(19) United States
(12) Patent Application Publication
(10) Pub. No.: US 2013/0116132 A1
(43) Pub. Date: May 9, 2013

(54) ALZHEIMER'S PROBE KIT

(71) Applicants: Praveen SHARMA, Oslo (NO); Torbjorn LINDAHL, Oslo (NO)

(72) Inventors: Praveen SHARMA, Oslo (NO); Torbjorn LINDAHL, Oslo (NO)

(73) Assignee: DIAGENIC ASA, Oslo (NO)

(21) Appl. No.: 13/339,631

(22) Filed: Dec. 29, 2011

(30) Foreign Application Priority Data
Nov. 3, 2011 (GB) 1118985.9

(51) Int. Cl. C40B 40/06; C40B 30/04

(52) U.S. Cl. 506/9; 506/16

(57) ABSTRACT

Oligonucleotide probes for use in assessing gene transcript levels in a sample, which may be used in analytical techniques, particularly diagnostic techniques, are disclosed. Conveniently the probes are provided in kit form. Different sets of probes may be used in techniques to prepare gene expression patterns and identify, diagnose or monitor neurodegenerative diseases or conditions and their progression.

### FIELD OF THE INVENTION

[0001] The present invention relates to oligonucleotide probes, for use in assessing gene transcript levels in a sample, which may be used in analytical techniques, particularly diagnostic techniques. Conveniently the probes are provided in kit form. Different sets of probes may be used in techniques to prepare gene expression patterns and identify, diagnose or monitor neurodegenerative diseases or conditions and their progression.

### BACKGROUND OF THE INVENTION

[0002] Neurodegenerative disease results in the progressive degeneration and/or death of nerve cells leading to problems with movement (ataxias) or mental functioning (dementias). In particular the method is concerned with identifying, diagnosing or monitoring cognitive impairment and its progression, e.g. to dementias such as Alzheimer's disease or stages thereof.

[0003] Dementias account for the majority of neurodegenerative diseases in the population. The prevalence of dementia is rapidly rising as the average age of the population increases. It is estimated that more than 24 million people worldwide have dementia. Alzheimer's disease accounts for the highest number of dementia cases, particularly in the elderly.

[0004] Evidence suggests that the pathophysiological process of dementia, e.g. Alzheimer's disease, begins years, if not decades, prior to the diagnosis of clinical dementia. Therapeutic interventions early in the pathophysiological process are more likely to be successful, particularly as treatments of Alzheimer's disease appear to have limited impact once the clinical symptoms appear and neuronal degradation has begun.

[0005] Thus, there is a need to identify patients that might progress to ataxia or dementia as soon as possible so that treatment and management strategies may be contemplated at an early stage. Current methods for detecting dementias have poor positive predictive accuracy of up to about 61% (Visser, 2006, Principles & Practice of Geriatric Medicine, 4th Edition, Eds. Pathy et al., Section 94).

[0006] In Alzheimer's disease and other dementias, the earliest clinical sign of the presence of a cognitive disorder is mild cognitive impairment (MCI) which is a predementia phase of cognitive dysfunction.

[0007] MCI is a general term that defines a mildly impaired set of patients which show reduced cognitive performance. MCI patients may be divided into amnestic MCI and non-amnestic MCI but even this is not predictive of whether the MCI will progress to dementia. Not all forms of MCI will evolve into a dementia such as Alzheimer's disease and some may be stable or exhibit improvement with time.

[0008] Thus MCI describes a group of patients grouped by clinical parameters rather than the underlying pathology. Within that group are sub-groups that will convert to Alzheimer's disease, that will convert to other dementias, which are stable or which will revert to normal cognitive function.

[0009] The sub-group of MCI patients that convert to dementia may be considered prodromal for that dementia, e.g. to have prodromal Alzheimer's disease (AD). It is generally accepted that the progression rate of patients with MCI to AD is between 10 and 15% per year but to date there is no reliable and easy way of identifying the sub-group that will convert.

[0010] Methods for identifying whether a patient will progress from MCI to Alzheimer's disease include assessment of various predictors of progression such as the ApoE ε4 carrier status, presence of atrophy on MRI, 18FDG PET pattern of Alzheimer's disease, presence of CSF markers (such as amyloid β1-42 peptide, total tau and phosphorylated tau) and a positive amyloid imaging scan (see Petersen et al., 2009, Arch. Neurol., 66(12), p1447-1454). However, whilst these predictors may be associated with Alzheimer's disease they are not always specific to Alzheimer's disease and more than one marker is usually necessary to aid diagnosis, particularly coupled with cognitive testing.

[0011] As mentioned above, to allow for early therapeutic intervention, early identification of neurodegnerative diseases or conditions is important, e.g. the identification of MCI patients that will progress to dementia. Okamura et al., 2002, Am. J. Psychiatry, 159:3, p474-476 used a combined test of CSF tau levels and regional cerebral blood flow in the posterior cingulate cortex. However, such methods are time consuming, complex and invasive with high cost and low patient compliance making introducing such diagnostic tools in a wide clinical setting challenging. Furthermore, cognitive markers have been found to be better predictors of conversion to dementia (Gomar et al., 2011, Arch. Gen Psychiatry, 68(9); p961-969). A simple test to identify and stage neurodegenerative disorders and diseases, particularly in relation to Alzheimer's disease would be desirable. In particular the use of an accurate blood based test would clearly be a valuable asset in the assessment of patients with possible neurodegenerative diseases or conditions.

[0012] In earlier work, the present inventors identified the systemic effect of various diseases and conditions on gene expression in blood cells, see e.g. WO98/49342 and WO04/046382, incorporated herein by reference, the latter of which describes specific probes for the diagnosis of breast cancer and Alzheimer's disease.

[0013] Blood tests based on gene expression profiling in the diagnosis of brain disorders have been described. In particular, the present inventors have identified that the expression of 96 genes allows the detection of patients with Alzheimer's disease (Rye et al., 2011, Journal of Alzheimer's Disease, 23, p121-129). However, these methods have not allowed for the determination of the stage or progression of the disease or for the identification of the sub-group within MCI patients that will progress to dementia. The identification of quick and easy methods of sample analysis for, for example, diagnostic applications, remains the goal of many researchers. End users seek methods which are cost effective, produce statistically significant results and which may be implemented routinely without the need for highly skilled individuals.

### SUMMARY OF THE INVENTION

[0014] We have now identified sets of probes which are of surprising utility for identifying, staging and monitoring neurodegenerative diseases and conditions, particularly Alzheimer's disease.

[0015] In work leading up to this invention, the inventors examined the level of expression of various genes in patients with neurodegenerative diseases at various stages relative to normal patients.

[0016] Thus in one aspect, the present invention provides a set of oligonucleotide probes, wherein said set comprises at least 10 oligonucleotides, wherein each of said 10 oligonucleotides, which are each different, are selected from:
[0017] (a) an oligonucleotide which is a part of a sequence as set forth in Table 1;
[0018] (b) an oligonucleotide derived from a sequence as set forth in Table 1;
[0019] (c) an oligonucleotide with a sequence complementary to the sequence of the oligonucleotide of a) or b); or
[0020] (d) an oligonucleotide which is functionally equivalent to an oligonucleotide as defined in (a), (b) or (c).

[0021] As referred to herein, a sequence as set forth in Table 1 is the sequence to which the assay refers, e.g. ASSAY0001 refers to sequence No. 1 provided herein. An oligonucleotide which is part of said sequence has the size as described hereinafter and satisfies the requirements of the oligonucleotide probes as described herein, e.g. in length and function. Such oligonucleotides include probes such as primers which correspond to a part of the disclosed sequence or the complementary sequence. More than one oligonucleotide may be a part of the sequence, e.g. to generate a pair of primers and/or a labelling probe.

[0022] In a preferred aspect the oligonucleotide has the sequence set forth in the context sequence for said full length sequence or a part thereof as described herein, wherein said context sequence is a portion of the full length sequence and is provided in Tables 2 to 9 in relation to the relevant sequence and is referred to herein as the oligonucleotide sequence from said Tables. As referred to herein, an oligonucleotide from a Table (or a Table oligonucleotide or probes) refers to an oligonucleotide which is a part of a sequence (oligonucleotide or full length) as set forth in a Table or its derived, complementary or functionally equivalent oligonucleotides.

[0023] Preferably, each of said 10 probes is part of a different sequence as set forth in Table 1, but one or more of said oligonucleotides may be replaced by the corresponding complementary or functionally equivalent oligonucleotide, i.e. replaced with an oligonucleotide that will bind to the same gene transcript. If, for example, only primers are to be used, in all likelihood all oligonucleotides will be parts of the provided sequences.

[0024] In a preferred aspect, said set comprises at least 15, 20, 30, 40, 50, 60 or especially preferably all of the probes of Table 1.

[0025] In particularly preferred aspects the probes may be from Tables 2 to 9 as described hereinafter.

[0026] Conveniently the 10 or more probes Which are selected are probes which are common to one or more of the Tables described herein. Thus, preferably said 10 or more probes are selected from probes which appear in both Tables 2 and 3 (in particular in relation to MCI stable versus converter analysis discussed hereinafter) or in both of Tables 9 and 10 (in particular in relation to determining the progression of Alzheimer's disease). In preferred alternative aspects, in Tables in which only some sequences exhibit a p-value of <0.5, the 10 or more probes may be selected from that group. These probes thus provide core probes to which additional probes may be added from relevant Tables. Each table of probes may also form a core group of probes (e.g. Table 3), to which additional probes may be added, e.g. one or probes from Table 2, in particular those exhibiting a p-value of <0.5.

[0027] These probes do not rely on the development of disease to clinically recognizable levels and allow detection of a neurodegenerative disease or disorder at a very early stage, even years before other subjective or objective symptoms appear.

[0028] The use of such probes in products and methods of the invention, form further aspects of the invention as described hereinafter.

### BRIEF DESCRIPTION OF THE DRAWINGS

[0029] FIG. 1 shows the population profile showing the probability of converted MCI (0 to 1) for each case (tag) demonstrating the discrimination between MCI stable and conversion. The 1st, 2nd, 4th-11th, 13th-24th, 26th-32nd, 35th, 54th and 64th cases were included in the MCI stable cohort and the other cases in the MCI conversion cohort.

[0030] FIGS. 2 to 9 the results of Permutation plots for the probes reported in tables 1A, 2, 3, 4, 5, 8, 9 and 10, respectively. AUC is the area under the curve and the X axis represents the number of variables selected from the corresponding Tables.

### DETAILED DESCRIPTION OF THE INVENTION

[0031] As referred to herein an “oligonucleotide” is a nucleic acid molecule having at least 6 monomers in the polymeric structure, i.e. nucleotides or modified forms thereof. The nucleic acid molecule may be DNA, RNA or PNA (peptide nucleic acid) or hybrids thereof or modified versions thereof, e.g. chemically modified forms, e.g. LNA (Locked Nucleic acid), by methylation or made up of modified or non-natural bases during synthesis, providing they retain their ability to bind to complementary sequences. Such oligonucleotides are used in accordance with the invention to probe target sequences and are thus referred to herein also as oligonucleotide probes or simply as “probes”.

[0032] “Probes” as referred to herein are oligonucleotides which bind to the relevant transcript and which allow the presence or amount of the target molecule to which they bind to be detected. Such probes may be, for example probes which act as a label for the target molecule (referred to hereinafter as labelling probes) or which allow the generation of a signal by another means, e.g. a primer.

[0033] As referred to herein a “labelling probe” refers to a probe which binds to the target sequence such that the combined target sequence and labelling probe carries a detectable label or which may otherwise be assessed by virtue of the formation of that association. For example, this may be achieved by using a labelled probe or the probe may act as a capture probe of labelled sequences as described hereinafter.

[0034] When used as a primer, the probe binds to the target sequence and optionally together with another relevant primer allows the generation of an amplification product indicative of the presence of the target sequence which may then be assessed and/or quantified. The primer may incorporate a label or the amplification process may otherwise incorporate or reveal a label during amplification to allow detection. Any oligonucleotides which bind to the target sequence and allow the generation of a detectable signal directly or indirectly are encompassed.

[0035] “Primers” refer to single or double-stranded oligonucleotides which hybridize to the target sequence and under appropriate conditions (i.e. in the presence of nucleotides and an inducing agent such as a DNA polymerase and at a suitable temperature and pH) act as a point of initiation of synthesis to allow amplification of the target sequence through elongation from the primer sequence e.g. via PCR.

[0036] In primer based methods, preferably real time quantitative PCR is used as this allows the efficient detection and quantification of small amounts of RNA in real time. The procedure follows the general RT-PCR principle in which mRNA is first transcribed to cDNA which is then used to amplify short DNA sequences with the help of sequence specific primers. Two common methods for detection of products in real-time PCR are: (1) non-specific fluorescent dyes that intercalate with any double-stranded DNA, for example SYBR green dye and (2) sequence-specific DNA probes consisting of oligonucleotides that are labelled with a fluorescent reporter which permits detection only after hybridization of the probe with its complementary DNA target for example the ABI TaqMan System (which is discussed in more detail in the Examples).

[0037] An “oligonucleotide derived from a sequence as set forth in Table 1” (or any other table) includes an oligonucleotide derived from the genes corresponding to the sequences (i.e. the presented oligonucleotides or the listed gene sequences) provided in those tables, i.e. to provide oligonucleotides which bind to transcripts from the same gene as the gene to whose transcripts the oligonucleotide of Table 1 binds, preferably which bind to the same transcript but in the alternative derived oligonucleotides may bind to splicing variants. Tables 2 to 9 provides gene identifiers for the various sequences (i.e. the gene sequence corresponding to the sequence provided). Details of the genes may be obtained from the Panther Classification System for genes, transcripts and proteins (see the website having the URL that ends in: pantherdb.org/genes). Alternatively details may be obtained directly from Applied Biosystems Inc., CA, USA. In this case the oligonucleotide forms a part of the gene sequence of which the sequence provided in any one of Tables 1 to 9 is a part. Thus the derived oligonucleotide may form a part of said gene (or its transcript). Thus, for example, labelling probe or primer sequences may be derived from anywhere on the gene to allow specific binding to that gene or its transcript. Thus in a preferred aspect said derived oligonucleotide is an oligonucleotide that is complementary to and binds to a gene as set forth in any one of Tables 1 to 9 or the complementary sequence of said gene.

[0038] Preferably the oligonucleotide probes forming said set (and hence the part of the sequence provided in the Tables) are at least 15 bases in length to allow binding of target molecules. Especially preferably said oligonucleotide probes are at least 10, 20, 30, 40 or 50 bases in length, but less than 200, 150, 100 or 50 bases, e.g. from 20 to 200 bases in length, e.g. from 30 to 150 bases, preferably 50-100 bases in length.

[0039] When that probe is a primer, similar considerations apply, but preferably said primers are from 10-30 bases in length, e.g. from 15-28 bases, e.g. from 20-25 bases in length. Usual considerations apply in the development of primers, e.g. preferably the primers have a G+C content of 50-60% and should end at the 3′-end in a G or C or CG or GC to increase efficiency, the 3′-ends should not be complementary to avoid primer dimers, primer self-complementarity should be avoided and runs of 3 or more Cs or Gs at the 3′ ends should be avoided. Primers should be of sufficient length to prime the synthesis of the desired extension product in the presence of the inducing agent.

[0040] To identify appropriate primers for performance of the invention, the gene sequences or oligonucleotide sequences provided in Tables 1 to 9 may be used to design primers or probes. Preferably said primers are generated to amplify short DNA sequences (e.g. 75 to 600 bases). Preferably short amplicons are amplified, e.g. preferably 75-150 bases. The probes and primers can be designed within an exon or may span an exon junction. For example, Tables 2 to 9 provides the ABI Taqman Assay ID that can be used to obtain additional information pertaining to Assay IDs from the supplier web page having the URL that ends in: appliedbiosystems.com/absite/us/en/home/applications-technologies/real-time-per/taqman-probe-based-gene-expression-analysis/taqman-gene-expression-assay-selection-guide.html. Once Taqman assays has been identified they can then be obtained from the supplier. Alternatively, the gene names and gene symbols can be used to identify the corresponding gene sequences in public databases, for example The National Center for Biotechnology Information (see the website having the URL that ends in: ncbi.nlm.nih.gov/). Alternatively, the oligonucleotide nucleotide sequences provided may be used to identify corresponding gene and transcript by aligning them to known sequences using Nucleotide Blast (Blastn) program at NCBI. Using the gene or transcript sequence, primers and probes can be designed by using freely or commercially available programs for oligonucleotide and primer design, for example The Primer Express Software by Applied Biosystems.

[0041] As referred to herein the term “complementary sequences” refers to sequences with consecutive complementary bases (i.e. T:A, G:C) and which complementary sequences are therefore able to bind to one another through their complementarity.

[0042] Reference to “10 oligonucleotides” refers to 10 different oligonucleotides. Whilst a Table 1 oligonucleotide, a Table 1 derived oligonucleotide and their functional equivalent are considered different oligonucleotides, complementary oligonucleotides are not considered different. Preferably however, the at least 10 oligonucleotides are 10 different Table 1 oligonucleotides (or Table 1 derived oligonucleotides or their functional equivalents). Thus said 10 different oligonucleotides are preferably able to bind to 10 different transcripts.

[0043] Preferably said oligonucleotides are as set forth in Table 1 or are derived from a sequence set forth in Table 1. Said derived oligonucleotides include oligonucleotides derived from the genes corresponding to the sequences provided in those tables, or the complementary sequences thereof.

[0044] In a preferred aspect, said oligonucleotides are as set forth in any one of Tables 2 to 9 or are derived from, complementary to or functionally equivalent to such oligonucleotides. Thus when the text refers to Table 1, this may equally be considered to refer to any of Tables 2 to 9 in preferred embodiments.

[0045] In a preferred embodiment, said set contains all of the probes (i.e. oligonucleotides) of any one of Tables 1 to 9 (or their derived, complementary sequences, or functional equivalents) or of the sub-sets described above or below. Thus in one aspect the set may contain all of the probes of any one of Tables 1 to 9 (or their derived, complementary sequences, or functional equivalents), i.e. oligonucleotides from all of the sequences sets forth in any one of Tables 1 to 9, or derived, complementary or functionally equivalent oligonucleotides thereof. In a preferred aspect the sets consist of only the above described probes (or their derived, complementary sequences, or functional equivalents).

[0046] In addition to the above described informative probes the set may contain one or more reference probes (also referred to herein as assays) which may be used to normalize or pre-process the gene expression data. For example beta-actin has been used in the methods described herein which has been found to be preferable for TaqMan data on the platforms tested.

[0047] A “set” as described herein refers to a collection of unique oligonucleotide probes (i.e. having a distinct sequence) and preferably consists of less than 1000 oligonucleotide probes, especially less than 500, 400, 300, 200 or 100 probes, and preferably more than 10, 20, 30, 40 or 50 probes, e.g. preferably from 10 to 500, e.g. 10 to 100, 200 or 300, especially preferably 20 to 100, e.g. 30 to 100 probes. In some cases less than 10 probes may be used, e.g. from 2 to 9 probes, e.g. 5 to 9 probes. As described hereinafter, in methods of the invention such sets may be used in the presence of other probes and the signal from those other probes may be ignored or not used in classification analyses. In such cases the sets may additionally consist of such secondary, non-informative probes as described in more detail hereinafter.

[0048] It will be appreciated that increasing the number of probes will prevent the possibility of poor analysis, e.g. misdiagnosis by comparison to other diseases or stages thereof which could similarly alter the expression of the particular genes in question. Other oligonucleotide probes not described herein may also be present, particularly if they aid the ultimate use of the set of oligonucleotide probes. However, preferably said set consists only of said Table 1 (or other Table) oligonucleotides, Table 1 (or other Table) derived oligonucleotides, complementary sequences or functionally equivalent oligonucleotides, or a sub-set (e.g. of the size and type as described above or below) thereof.

[0049] Multiple copies of each unique oligonucleotide probe, e.g. 10 or more copies, may be present in each set, but constitute only a single probe.

[0050] A set of oligonucleotide probes, which may preferably be immobilized on a solid support or have means for such immobilization, comprises the at least 10 oligonucleotide probes selected from those described hereinbefore. As mentioned above, these 10 probes must be unique and have different sequences. Having said this however, two separate probes may be used which recognize the same gene but reflect different splicing events. However oligonucleotide probes which are complementary to, and bind to distinct genes are preferred.

[0051] When probes of the set are primers, in a preferred aspect pairs of primers are provided. In such cases the reference to the oligonucleotides that should be present (e.g. 10 oligonucleotides) should be scaled up accordingly, i.e. 20 oligonucleotides which correspond to 10 pairs of primers, each pair being specific for a particular target sequence. In a further alternative, the probes of the set may comprise both labelling probes and primers directed to a single target sequence (e.g. for the Taqman assay described in more detail hereinafter). In this case the reference to oligonucleotides that should be present (e.g. 10 oligonucleotides) should be scaled up to 30 oligonucleotides, i.e. 10 pairs of primers and a corresponding relevant labelled probe for a particular target sequence.

[0052] Thus in a preferred aspect the set of the invention comprises at least 20 oligonucleotides and said set comprises pairs of primers in which each oligonucleotide in said pair of primers binds to the same transcript or its complementary sequence and preferably each of the pairs of primers bind to a different transcript. In a further preferred aspect the invention provides a set of oligonucleotide probes which comprises at least 30 oligonucleotides and said set comprises pairs of primers and a labelled probe for each pair of primers in which each oligonucleotide in said pair of primers and said labelled probe bind to the same transcript or its complementary sequence and preferably each of the pairs of primers and the labelled probe bind to different transcripts. The labelled probe is “related” to its pair of primers insofar as the primers bind up or downstream of the target sequence to which the labelled probe binds on the same transcript.

[0053] As described herein a “functionally equivalent” oligonucleotide to those set forth in Table 1 (or other Tables) or derived therefrom refers to an oligonucleotide which is capable of identifying the same gene as an oligonucleotide of Table 1 or derived therefrom, i.e. it can bind to the same mRNA molecule (or DNA) or a splice variant transcribed from a gene (target nucleic acid molecule) as the Table 1 oligonucleotide or the Table 1 derived oligonucleotide (or its complementary sequence) but does not have precise complementarity to the mRNA or DNA (unlike derived sequences). Preferably said functionally equivalent oligonucleotide is capable of recognizing, i.e. binding to the same splicing product as a Table 1 oligonucleotide or a Table 1 derived oligonucleotide. Preferably said mRNA molecule is the full length mRNA molecule which corresponds to the Table 1 oligonucleotide or the Table 1 derived oligonucleotide.

[0054] As referred to herein “capable of binding” or “binding” refers to the ability to hybridize under conditions described hereinafter.

[0055] Alternatively expressed, functionally equivalent oligonucleotides (or complementary sequences) have sequence identity or will hybridize, as described hereinafter, to a region of the target molecule to which molecule a Table 1 oligonucleotide or a Table 1 derived oligonucleotide or a complementary oligonucleotide binds. Preferably, functionally equivalent oligonucleotides (or their complementary sequences) hybridize to one of the mRNA sequences which corresponds to a Table 1 oligonucleotide or a Table 1 derived oligonucleotide under the conditions described hereinafter or has sequence identity to a part of one of the mRNA sequences which corresponds to a Table 1 oligonucleotide or a Table 1 derived oligonucleotide. A “part” in this context refers to a stretch of at least 5, e.g. at least 10 or 20 bases, such as from 5 to 100, e.g. 10 to 50 or 15 to 30 bases.

[0056] In a particularly preferred aspect, the functionally equivalent oligonucleotide binds to all or a part of the region of a target nucleic acid molecule (mRNA or cDNA) to which the Table 1 oligonucleotide or Table 1 derived oligonucleotide binds. A “target” nucleic acid molecule is the gene transcript or related product e.g. mRNA, or cDNA, or amplified product thereof. Said “region” of said target molecule to which said Table 1 oligonucleotide or Table 1 derived oligonucleotide binds is the stretch over which complementarity exists. At its largest this region is the whole length of the Table 1 oligonucleotide or Table 1 derived oligonucleotide, but may be shorter if the entire Table 1 sequence or Table 1 derived oligonucleotide is not complementary to a region of the target sequence.

[0057] As referred to herein any reference to Table 1 may equally be interpreted as applying to any one of Tables 2 to 9.

[0058] Preferably said part of said region of said target molecule is a stretch of at least 5, e.g. at least 10 or 20 bases, such as from 5 to 100, e.g. 10 to 50 or 15 to 30 bases. This may for example be achieved by said functionally equivalent oligonucleotide having several identical bases to the bases of the Table 1 oligonucleotide or the Table 1 derived oligonucleotide. These bases may be identical over consecutive stretches, e.g. in a part of the functionally equivalent oligonucleotide, or may be present non-consecutively, but provide sufficient complementarity to allow binding to the target sequence.

[0059] Thus in a preferred feature, said functionally equivalent oligonucleotide hybridizes under conditions of high stringency to a Table 1 oligonucleotide or a Table 1 derived oligonucleotide or the complementary sequence thereof. Alternatively expressed, said functionally equivalent oligonucleotide exhibits high sequence identity to all or part of a Table 1 oligonucleotide. Preferably said functionally equivalent oligonucleotide has at least 70% sequence identity, preferably at least 80%, e.g. at least 90, 95, 98 or 99%, to all of a Table 1 (or any of Tables 2 to 9) oligonucleotide or a part thereof (or all or part of a sequence set forth in any of those Tables). As used in this context, a “part” refers to a stretch of at least 5, e.g. at least 10 or 20 bases, such as from 5 to 100, e.g. 10 to 50 or 15 to 30 bases, in said Table 1 oligonucleotide. Especially preferably when sequence identity to only a part of said Table 1 oligonucleotide is present, the sequence identity is high, e.g. at least 80% as described above.

[0060] Functionally equivalent oligonucleotides which satisfy the above stated functional requirements include those which are derived from the Table 1 oligonucleotides and also those which have been modified by single or multiple nucleotide base (or equivalent) substitution, addition and/or deletion, but which nonetheless retain functional activity, e.g. bind to the same target molecule as the Table 1 oligonucleotide or the Table 1 oligonucleotide from which they are further derived or modified. Preferably said modification is of from 1 to 50, e.g. from 10 to 30, preferably from 1 to 5 bases. Especially preferably only minor modifications are present, e.g. variations in less than 10 bases, e.g. less than 5 base changes.

[0061] Within the meaning of “addition” equivalents are included oligonucleotides containing additional sequences which are complementary to the consecutive stretch of bases on the target molecule to which the Table 1 oligonucleotide or the Table 1 derived oligonucleotide binds. Alternatively the addition may comprise a different, unrelated sequence, which may for example confer a further property, e.g. to provide a means for immobilization such as a linker to bind the oligonucleotide probe to a solid support.

[0062] Particularly preferred are naturally occurring equivalents such as biological variants, e.g. allelic, geographical or allotypic variants, e.g. oligonucleotides which correspond to a genetic variant, for example as present in a different species.

[0063] Functional equivalents include oligonucleotides with modified bases, e.g. using non-naturally occurring bases. Such derivatives may be prepared during synthesis or by post production modification.

[0064] “Hybridizing” sequences which bind under conditions of low stringency are those which bind under non-stringent conditions (for example, 6×SSC/50% formamide at room temperature) and remain bound when washed under conditions of low stringency (2×SSC, room temperature, more preferably 2×SSC, 42° C.). Hybridizing under high stringency refers to the above conditions in which washing is performed at 2×SSC, 65° C. (where SSC=0.15M NaCl, 0.015M sodium citrate, pH 7.2).

[0065] “Sequence identity” as referred to herein refers to the value obtained when assessed using ClustalW (Thompson et al., 1994, Nucl. Acids Res., 22, p4673-4680) with the following parameters:

Pairwise alignment parameters—Method: accurate, Matrix: IUB, Gap open penalty: 15.00, Gap extension penalty: 6.66;
Multiple alignment parameters—Matrix: IUB, Gap open penalty: 15.00, % identity for delay: 30, Negative matrix: no, Gap extension penalty: 6.66, DNA transitions weighting: 0.5.

[0066] Sequence identity at a particular base is intended to include identical bases which have simply been derivatized.

[0067] As described above, conveniently said set of oligonucleotide probes may be immobilized on one or more solid supports. Single or preferably multiple copies of each unique probe are attached to said solid supports, e.g. 10 or more, e.g. at least 100 copies of each unique probe are present. Furthermore, as described hereinafter, the set of probes may be contained in platforms containing secondary probes which are not of interest and in that case such platforms may be used and only the signals associated with the probes of interest analysed. This is particularly applicable in the case of large commercially available arrays carrying an abundance of relevant probes.

[0068] Alternatively probes may be synthesized in situ onto arrays such as the Affymetrix platforms by methods known in the art.

[0069] One or more unique oligonucleotide probes may be associated with separate solid supports which together form a set of probes immobilized on multiple solid support, e.g. one or more unique probes may be immobilized on multiple beads, membranes, filters, biochips etc. which together form a set of probes, which together form modules of the kit described hereinafter. The solid support of the different modules are conveniently physically associated although the signals associated with each probe (generated as described hereinafter) must be separately determinable. Alternatively, the probes may be immobilized on discrete portions of the same solid support, e.g. each unique oligonucleotide probe, e.g. in multiple copies, may be immobilized to a distinct and discrete portion or region of a single filter or membrane, e.g. to generate an array.

[0070] A combination of such techniques may also be used, e.g. several solid supports may be used which each immobilize several unique probes.

[0071] The expression “solid support” shall mean any solid material able to bind oligonucleotides by hydrophobic, ionic or covalent bridges.

[0072] “Immobilization” as used herein refers to reversible or irreversible association of the probes to said solid support by virtue of such binding. If reversible, the probes remain associated with the solid support for a time sufficient for methods of the invention to be carried out.

[0073] Numerous solid supports suitable as immobilizing moieties according to the invention, are well known in the art and widely described in the literature and generally speaking, the solid support may be any of the well-known supports or matrices which are currently widely used or proposed for immobilization, separation etc. in chemical or biochemical procedures. Such materials include, but are not limited to, any synthetic organic polymer such as polystyrene, polyvinylchloride, polyethylene; or nitrocellulose and cellulose acetate; or tosyl activated surfaces; or glass or nylon or any surface carrying a group suited for covalent coupling of nucleic acids. The immobilizing moieties may take the form of particles, sheets, gels, filters, membranes, microfibre strips, tubes or plates, fibres or capillaries, made for example of a polymeric material e.g. agarose, cellulose, alginate, teflon, latex or polystyrene or magnetic beads. Solid supports allowing the presentation of an array, preferably in a single dimension are preferred, e.g. sheets, filters, membranes, plates or biochips.

[0074] Attachment of the nucleic acid molecules to the solid support may be performed directly or indirectly. For example if a filter is used, attachment may be performed by UV-induced crosslinking. Alternatively, attachment may be performed indirectly by the use of an attachment moiety carried on the oligonucleotide probes and/or solid support. Thus for example, a pair of affinity binding partners may be used, such as avidin, streptavidin or biotin, DNA or DNA binding protein (e.g. either the lac I repressor protein or the lac operator sequence to which it binds), antibodies (which may be mono- or polyclonal), antibody fragments or the epitopes or haptens of antibodies. In these cases, one partner of the binding pair is attached to (or is inherently part of) the solid support and the other partner is attached to (or is inherently part of) the nucleic acid molecules.

[0075] As used herein an “affinity binding pair” refers to two components which recognize and bind to one another specifically (i.e. in preference to binding to other molecules). Such binding pairs when bound together form a complex.

[0076] Attachment of appropriate functional groups to the solid support may be performed by methods well known in the art, which include for example, attachment through hydroxyl, carboxyl, aldehyde or amino groups which may be provided by treating the solid support to provide suitable surface coatings. Solid supports presenting appropriate moieties for attachment of the binding partner may be produced by routine methods known in the art.

[0077] Attachment of appropriate functional groups to the oligonucleotide probes of the invention may be performed by ligation or introduced during synthesis or amplification, for example using primers carrying an appropriate moiety, such as biotin or a particular sequence for capture.

[0078] In the alternative, probes may be used without immobilization, e.g. tube based arrays may be used in which the probes are used in solution, e.g. in real time quantitative PCR.

[0079] Conveniently, the set of probes described hereinbefore is provided in kit form.

[0080] Thus viewed from a further aspect the present invention provides a kit comprising a set of oligonucleotide probes as described hereinbefore optionally immobilized on one or more solid supports.

[0081] Preferably, said probes are immobilized on a single solid support and each unique probe is attached to a different region of said solid support. However, when attached to multiple solid supports, said multiple solid supports form the modules which make up the kit. Especially preferably said solid support is a sheet, filter, membrane, plate or biochip.

[0082] Optionally the kit may also contain information relating to the signals generated by normal or diseased samples (as discussed in more detail hereinafter in relation to the use of the kits), standardizing materials, e.g. mRNA or cDNA from normal and/or diseased samples for comparative purposes, or reference probes as described before, labels for incorporation into cDNA, adapters for introducing nucleic acid sequences for amplification purposes, primers for amplification and/or appropriate enzymes, buffers and solutions. Optionally said kit may also contain a package insert describing how the method of the invention should be performed, optionally providing standard graphs, data or software for interpretation of results obtained when performing the invention.

[0083] The use of such kits to prepare a standard diagnostic gene transcript pattern as described hereinafter forms a further aspect of the invention.

[0084] The set of probes as described herein have various uses. Principally however they are used to assess the gene expression state of a test cell(s) in a sample to provide information relating to the organism from which said cell is derived. Gene expression alterations may be evident within the cell (e.g. mRNA transcripts) or in material released from the cell (e.g. microRNA or polypeptides) and thus the gene expression state of the cell may be tested by analysing either the cells or a sample containing the cells or material released from cells. The probes disclosed herein are useful in diagnosing, identifying or monitoring neurodegenerative diseases and various stages thereof in an organism.

[0085] Thus in a further aspect the invention provides the use of a set of oligonucleotide probes or a kit as described hereinbefore to determine the gene expression pattern of a cell or sample where the pattern reflects the level of gene expression of genes to which said oligonucleotide probes bind, comprising at least the steps of:

[0086] a) isolating mRNA from said cell or sample, which may optionally be reverse transcribed to cDNA;

[0087] b) hybridizing the mRNA or cDNA of step (a) to a set of oligonucleotide probes or a kit as defined herein; and

[0088] c) assessing the amount of mRNA or cDNA hybridizing to each of said probes to produce said pattern,

wherein the oligonucleotides in said set of oligonucleotides or kit are primary oligonucleotides and said set or kit may additionally comprise secondary oligonucleotides which are not assessed in step c).

[0089] In the method described above secondary oligonucleotides may be present which are effectively ignored during the analysis. This allows large arrays containing the probes of interest to be used but only the information provided by hybridization of the sample to those probes is analysed. This also allows the generation of arrays which may be used for a variety of methods by analysis of the hybridization pattern of only select probes.

[0090] As mentioned previously, the oligonucleotide probes may act as direct labels of the target sequence (insofar as the complex between the target sequence and the probe carries a label) or may be used as primers. In the case of the former step c) may be performed by any appropriate means of detecting the hybridized entity, e.g. if the mRNA or cDNA is labelled the retention of label in a kit may be assessed. In the case of primers, those primers may be used to generate an amplification product which may be assessed. In that case in step b) said probes are hybridized to the mRNA or cDNA and used to amplify the mRNA or cDNA or a part thereof (of the size described herein for parts or preferred sizes for amplicons) and in step c) the amount of amplified product is assessed to produce the pattern.

[0091] In the case of techniques in which both primers and labelling probes are used, in the above method the primers and labelling probes are hybridized to the mRNA or cDNA in step b) and used to amplify the mRNA or cDNA or a part thereof. This amplification causes displacement of probes binding to relevant target sequences and the generation of a signal. In this case, in step c) the amount of mRNA or cDNA hybridizing to the probes is assessed by determining the presence or amount of the signal which is generated. Thus in a preferred aspect, said probes are labelling probes and pairs of primers and in step b) said labelling probes and primers are hybridized to said mRNA or cDNA and said mRNA or cDNA or a part thereof is amplified using said primers, wherein when said labelling probe binds to the target sequence it is displaced during amplification thereby generating a signal and in step c) the amount of signal generated is assessed to produce said pattern. All modes of detection of the presence or amount of binding of the probes as described herein to the target sequence are covered by the above described method and methods of the invention described hereinafter.

[0092] The mRNA and cDNA as referred to in this method, and the methods hereinafter, encompass derivatives or copies of said molecules, e.g. copies of such molecules such as those produced by amplification or the preparation of complementary strands, but which retain the identity of the mRNA sequence, i.e. would hybridize to the direct transcript (or its complementary sequence) by virtue of precise complementarity, or sequence identity, over at least a region of said molecule. It will be appreciated that complementarity will not exist over the entire region where techniques have been used which may truncate the transcript or introduce new sequences, e.g. by primer amplification. For convenience, said mRNA or cDNA is preferably amplified prior to step b). As with the oligonucleotides described herein said molecules may be modified, e.g. by using non-natural bases during synthesis providing complementarity remains. Such molecules may also carry additional moieties such as signalling or immobilizing means.

[0093] The various steps involved in the method of preparing such a pattern are described in more detail hereinafter.

[0094] As used herein “gene expression” refers to transcription of a particular gene to produce a specific mRNA product (i.e. a particular splicing product). The level of gene expression may be determined by assessing the level of transcribed mRNA molecules or cDNA molecules reverse transcribed from the mRNA molecules or products derived from those molecules, e.g. by amplification.

[0095] The “pattern” created by this technique refers to information which, for example, may be represented in tabular or graphical form and conveys information about the signal associated with two or more oligonucleotides. Preferably said pattern is expressed as an array of numbers relating to the expression level associated with each probe.

[0096] Preferably, said pattern is established using the following linear model:

y=Xb+f Equation 1

wherein, X is the matrix of gene expression data and y is the response variable, b is the regression coefficient vector and f the estimated residual vector. Although many different methods can be used to establish the relationship provided in equation 1, especially preferably the partial Least Squares Regression (PLSR) method is used for establishing the relationship in equation 1.

[0097] The probes are thus used to generate a pattern which reflects the gene expression of a cell at the time of its isolation or a sample which may or may not contain cells but which carries expression products released by the cell. The pattern of expression is characteristic of the circumstances under which that cells finds itself and depends on the influences to which the cell has been exposed. Thus, a characteristic gene transcript pattern standard or fingerprint (standard probe pattern) for cells or samples from an individual with a neurodegenerative disease or condition or a stage thereof may be prepared and used for comparison to transcript patterns of test cells. This has clear applications in diagnosing, monitoring or identifying whether an organism is suffering from a neurodegenerative disease or condition or a stage thereof.

[0098] As described in the Examples in more detail, the probes of the invention have various uses in discriminating between various conditions in the spectrum of early to late stage neurodegenerative diseases and conditions. Principally, the probes may be used to identify a particular stage of a disease or condition or to assess the progression (predictive and retrospective) of a disease or condition. This information may be used for various purposes, e.g. for monitoring drug efficacy, to optimize drug dosage, to assess efficacy of a therapeutic treatment (e.g. to identify drugs with therapeutic potential), to identify patients suitable for treatment or clinical trails and drug discovery based on the stage of their disease or disorder (the latter which would reduce cost of patient enrolment), but more particularly to identify the stage of a particular disease or condition and/or its progression to allow its management and treatment. The methods are particularly useful in relation to Alzheimer's disease, e.g. for drug development or discovery particularly for very early stages of the disease. Thus, the present invention is concerned with a method of identifying the stage or progression of a neurological disorder or condition.

[0099] As used herein, a “stage” of a neurological disease or condition refers to different stages of the neurological disorder or disease which may or may not exhibit particular physiological or metabolic changes, but do exhibit changes at the genetic level which may be detected as altered gene expression. It will be appreciated that during the course of a neurological disease or disorder (or its treatment) the expression of different transcripts may vary. Thus at different stages, altered expression may not be exhibited for particular transcripts compared to “normal” samples. However, combining information from several transcripts which exhibit altered expression at one or more stages through the course of the disease or condition can be used to provide a characteristic pattern which is indicative of a particular stage of disease or condition. The stages of a neurological disease or disorder may be identified based on cognitive or motor performance tests. For example MMSE (Folstein et al., 1975, J. Psych. Res., 12(3), p189-198) and Global CDR (Morris, 1993, Neurology, 43, p2412-2414).

[0100] The maximum score for the MMSE is 30. A score of 30 is classed as normal. Based on NHS UK (see the website having the URL that ends in: nhs.uk/Conditions/Alzheimers-disease/Pages/Diagnosis.aspx

Alzheimer's disease is classified as follows:
Mild: MMSE score of between 21 and 26
Moderate: MMSE score of between 10 and 20 M
Moderately severe: MMSE score of between 10 and 14
Severe: MMSE score of less than 10

[0101] Clinical Dementia Rating Scale (CDR) is a global assessment instrument that yields global (Morris, 1993, supra) and Sum of Boxes (SOB) scores (O'Bryant et al. 2008, Arch Neurol., 65(8), p1091-1095). Based on the scores the dementia severity is staged as follows:

Global CDR

| | |
|---|---|
| 0 | Normal |
| 0.5 | Very mild |
| 1 | Mild |
| 2 | Moderate |
| 3 | Severe |

Sum of Boxes Staging Category

| | |
|---|---|
| 0 | Normal |
| 0.5-4 | Questionable cognitive impairment |
| 0.5-2.5 | Questionable impairment |
| 3.0-4.0 | Very mild dementia |
| 4.5-9.0 | Mild dementia |
| 9.5-15.5 | Moderate dementia |
| 16.0-18.0 | Severe dementia |

These two scores (Global CDR and Sum of Boxes scores) were utilized to classify patients with clear progression and patients with no clear progressions for Prospective and Retrospective Intra-person modeling as described in the Example.

[0102] Stages of neurological disorders or diseases having MMSE, Global CDR and/or Sum of Boxes scores as described above constitute preferred stages according to the invention.

[0103] As used herein, the “progression” of a neurological disease or condition encompasses both predictive and retrospective progression and refers to the development of the condition or disease from one stage to the next e.g. from mild to moderate or moderate to severe. In dementias, this progression may be from pre-clinical to prodromal MCI to early dementia to severe dementia. In Alzheimer's disease for example the disease may progress from very mild, to mild, to moderate to severe. CDRs associated with these stages are in the order of 0.5, 1.0, 2.0 and 3.0 respectively. Progression includes both monitoring over several time points and a single assessment for predictive assessments.

[0104] In order to assess the stage or progression of a neurological disease or condition, a standard pattern representative of that stage, or multiple stages to assess progression retrospectively or progression profile to assess progression predictively, must be prepared. The standard pattern is prepared by determining the extent of binding of total mRNA (or cDNA or related product), from cells or released expression products from a sample of one or more organisms with a neurological disease or condition with a specific stage or progression profile, to the probes. This reflects the level of transcripts which are present which correspond to each unique probe. The amount of nucleic acid material which binds to the different probes is assessed and this information together forms the gene transcript pattern standard of said neurological disease or condition with a specific stage and/or progression profile. Each such standard pattern is characteristic of a neurological disease or condition with a specific stage or progression profile.

[0105] As referred to herein a “progression profile” refers to a stage of a neurological disease or condition with specific clinical and/or pathological characteristics indicative of the expected progression of that disease or condition, e.g. prodromal dementia or stable MCI. Thus a progression profile is predictive of a particular type of progression.

[0106] In a further aspect therefore, the present invention provides a method of preparing a standard gene transcript pattern characteristic of a neurological disease or condition with a specific stage or progression profile in an organism comprising at least the steps of:

[0107] a) isolating mRNA from a blood sample (e.g. containing cells) of one or more organisms having said neurological disease or condition with a specific stage or progression profile, which may optionally be reverse transcribed to cDNA;

[0108] b) hybridizing the mRNA or cDNA of step (a) to a set of oligonucleotides or a kit as described hereinbefore specific for said neurological disease or condition with a specific stage or progression profile in an organism and sample thereof corresponding to the organism and sample thereof under investigation; and

[0109] c) assessing the amount of mRNA or cDNA hybridizing to each of said probes to produce a characteristic pattern reflecting the level of gene expression of genes to which said oligonucleotides bind, in the sample with said neurological disease or condition with a specific stage or progression profile.

[0110] As described hereinbefore, the set of probes or kit may contain uninformative secondary probes.

[0111] For convenience, said oligonucleotides are preferably immobilized on one or more solid supports.

[0112] However, in a preferred aspect, said method is performed using primers which amplify the mRNA or cDNA or a part thereof and the amount of amplified product is assessed to produce the pattern. As described hereinbefore, both labelled probes and primers may be used in preferred aspects of the invention.

[0113] The standard pattern for various specific stages or progression profiles of neurological diseases or conditions using particular probes may be accumulated in databases and be made available to laboratories on request.

[0114] “Disease” samples and organisms or “neurological disease or condition with a specific stage or progression profile” samples and organisms as referred to herein refer to organisms (or samples from the same) with clinical or pathological evidence of a neurological disease or condition. Such organisms are known to have, or which exhibit, the neurological disease or condition under study.

[0115] “A neurological disease or condition” refers to a disease or condition which affects neurons in the brain or spinal cord and encompasses central nervous system diseases or conditions in which neuron defects occur. Examples of neurodegenerative diseases include Parkinson's, Huntington's disease and dementias. Particular dementias of interest are Alzheimer's disease, vascular dementia, dementia with Lewy bodies and frontotemporal dementia. Neurological diseases and conditions as referred to herein also encompass mild cognitive impairment (MCI) which may have various causes. Such causes include dementias and other neurodegenerative diseases discussed above as well as conditions such as depression and bipolar disorders, such as schizophrenia, all of which are covered under neurological diseases and conditions.

[0116] Neurodegenerative diseases or conditions result in progressive degeneration and/or death of nerve cells which causes problems with movement (called ataxias), or mental functioning (called dementias). The methods described herein may be used to identify or diagnose whether an individual has a specific stage or progression or progression profile of a neurological disease or condition by developing the appropriate classification models for those conditions.

[0117] “Normal” as used herein refers to organisms or samples which are used for comparative purposes. Preferably, these are “normal” in the sense that they do not exhibit any indication of, or are not believed to have, any disease or condition that would affect gene expression, particularly in respect of a neurological condition or disease for which they are to be used as the normal standard. However, it will be appreciated that different stages of a neurological disease or condition may be compared and in such cases, the “normal” sample may correspond to the earlier stage of that neurological condition or disease.

[0118] As used herein a “sample” refers to any sample obtained from the organism, e.g. human or non-human animal under investigation which contains cells or material secreted from cells and includes, tissues, body fluid or body waste or in the case of prokaryotic organisms, the organism itself. “Body fluids” include blood, saliva, spinal fluid, semen, lymph. “Body waste” includes urine, expectorated matter (pulmonary patients), faeces etc. “Tissue samples” include tissue obtained by biopsy, by surgical interventions or by other means e.g. placenta. Preferably however, the samples which are examined are from areas of the body not apparently affected by the disease or condition. The cells in such samples are not disease cells, i.e. neurons, have not been in contact with such disease cells and do not originate from the site of the disease or condition. The “site of disease” is considered to be that area of the body which manifests the disease in a way which may be objectively determined, e.g. the CNS. Preferably the sample is from blood or is cerebrospinal fluid. The former is particularly preferred. Cerebrospinal fluid may be used for assessment of polypeptides or microRNA as described hereinafter. Preferably the sample from blood is whole blood or a blood product (i.e. a product derived, separated or isolated from blood), such as plasma or serum. Preferably, peripheral blood is used for diagnosis.

[0119] It will however be appreciated that the method of preparing the standard transcription pattern and other methods of the invention are also applicable for use on living parts of eukaryotic organisms such as cell lines and organ cultures and explants.

[0120] As used herein, reference to “corresponding” sample etc. refers to samples containing cells or cell products preferably from the same tissue, body fluid or body waste, (e.g. blood or blood products) and preparation method, but also includes samples containing cells or cell products from tissue, body fluid or body waste which are sufficiently similar for the purposes of preparing the standard or test pattern. When used in reference to genes “corresponding” to the probes, this refers to genes which are related by sequence (which may be complementary) to the probes although the probes may reflect different splicing products of expression.

[0121] “Assessing” as used herein refers to both quantitative and qualitative assessment which may be determined in absolute or relative terms. Any appropriate techniques for the assessment may be used. For example SOLiD™ SAGE™ systems may be used for quantification of gene expression.

[0122] The invention may be put into practice as follows.

[0123] To prepare a standard transcript pattern for a specific stage or progression profile of a neurological disease or condition, sample mRNA is extracted from the sample, e.g. cells of tissues, body fluid or body waste (e.g. from blood or blood products) according to known techniques (see for example Sambrook et. al. (1989), Molecular Cloning: A laboratory manual, 2nd Ed., Cold Spring Harbor Laboratory Press, Cold Spring Harbor, N.Y.) from an individual or organism with a specific stage or progression profile of a neurological disease or condition.

[0124] Owing to the difficulties in working with RNA, the RNA is preferably reverse transcribed to form first strand cDNA. Cloning of the cDNA or selection from, or using, a cDNA library is not however necessary in this or other methods of the invention. Preferably, the complementary strands of the first strand cDNAs are synthesized, i.e. second strand cDNAs, but this will depend on which relative strands are present in the oligonucleotide probes. The RNA may however alternatively be used directly without reverse transcription and may be labelled if so required.

[0125] Preferably the cDNA strands are amplified by known amplification techniques such as the polymerase chain reaction (PCR) by the use of appropriate primers. Alternatively, the cDNA strands may be cloned with a vector, used to transform a bacteria such as E. coli which may then be grown to multiply the nucleic acid molecules. When the sequence of the cDNAs are not known, primers may be directed to regions of the nucleic acid molecules which have been introduced. Thus for example, adapters may be ligated to the cDNA molecules and primers directed to these portions for amplification of the cDNA molecules. Alternatively, in the case of eukaryotic samples, advantage may be taken of the polyA tail and cap of the RNA to prepare appropriate primers.

[0126] To produce the standard diagnostic gene transcript pattern or fingerprint for a specific stage or progression profile of a neurological disease or condition, the above described oligonucleotide probes are used to probe mRNA or cDNA of the diseased sample to produce a signal for hybridization to each particular oligonucleotide probe species, i.e. each unique probe. A standard control gene transcript pattern may also be prepared if desired using mRNA or cDNA from a normal sample. Thus, mRNA or cDNA is brought into contact with the oligonucleotide probe under appropriate conditions to allow hybridization. Alternatively, specific primer sequences for highly and moderately expressed genes can be designed and methods such as quantitative RT-PCR can be used to determine the levels of highly and moderately expressed genes, particularly the genes as described herein. Hence, a skilled practitioner may use a variety of techniques which are known in the art for determining the relative level of mRNA in a biological sample.

[0127] When multiple samples are probed, this may be performed consecutively using the same probes, e.g. on one or more solid supports, i.e. on probe kit modules, or by simultaneously hybridizing to corresponding probes, e.g. the modules of a corresponding probe kit.

[0128] To identify when hybridization occurs and obtain an indication of the number of transcripts/cDNA molecules which become bound to the oligonucleotide probes, it is necessary to identify a signal produced when the transcripts (or related molecules) hybridize (e.g. by detection of double stranded nucleic acid molecules or detection of the number of molecules which become bound, after removing unbound molecules, e.g. by washing, or by detection of a signal generated by an amplified product).

[0129] In order to achieve a signal, either or both components which hybridize (i.e. the probe and the transcript) may carry or form a signalling means or a part thereof. This “signalling means” is any moiety capable of direct or indirect detection by the generation or presence of a signal. The signal may be any detectable physical characteristic such as conferred by radiation emission, scattering or absorption properties, magnetic properties, or other physical properties such as charge, size or binding properties of existing molecules (e.g. labels) or molecules which may be generated (e.g. gas emission etc.). Techniques are preferred which allow signal amplification, e.g. which produce multiple signal events from a single active binding site, e.g. by the catalytic action of enzymes to produce multiple detectable products.

[0130] Conveniently the signalling means may be a label which itself provides a detectable signal. Conveniently this may be achieved by the use of a radioactive or other label which may be incorporated during cDNA production, the preparation of complementary cDNA strands, during amplification of the target mRNA/cDNA or added directly to target nucleic acid molecules.

[0131] Appropriate labels are those which directly or indirectly allow detection or measurement of the presence of the transcripts/cDNA. Such labels include for example radiolabels, chemical labels, for example chromophores or fluorophores (e.g. dyes such as fluorescein and rhodamine), or reagents of high electron density such as ferritin, haemocyanin or colloidal gold. Alternatively, the label may be an enzyme, for example peroxidase or alkaline phosphatase, wherein the presence of the enzyme is visualized by its interaction with a suitable entity, for example a substrate. The label may also form part of a signalling pair wherein the other member of the pair is found on, or in close proximity to, the oligonucleotide probe to which the transcript/cDNA binds, for example, a fluorescent compound and a quench fluorescent substrate may be used. A label may also be provided on a different entity, such as an antibody, which recognizes a peptide moiety attached to the transcripts/cDNA, for example attached to a base used during synthesis or amplification.

[0132] A signal may be achieved by the introduction of a label before, during or after the hybridization step. Alternatively, the presence of hybridizing transcripts may be identified by other physical properties, such as their absorbance, and in which case the signalling means is the complex itself.

[0133] The amount of signal associated with each oligonucleotide probe is then assessed. The assessment may be quantitative or qualitative and may be based on binding of a single transcript species (or related cDNA or other products) to each probe, or binding of multiple transcript species to multiple copies of each unique probe. It will be appreciated that quantitative results will provide further information for the transcript fingerprint of the specific stage or progression profile of the neurological disease or condition which is compiled. This data may be expressed as absolute values (in the case of macroarrays) or may be determined relative to a particular standard or reference e.g. a normal control sample.

[0134] Furthermore it will be appreciated that the standard diagnostic gene pattern transcript may be prepared using one or more disease (specific stage or progression profile of a neurological disease or condition) samples (and normal samples if used) to perform the hybridization step to obtain patterns not biased towards a particular individual's variations in gene expression.

[0135] The use of the probes to prepare standard patterns and the standard diagnostic gene transcript patterns thus produced for the purpose of identification or diagnosis or monitoring of a specific stage or progression or progression profile of a neurological disease or condition in a particular organism forms a further aspect of the invention.

[0136] Once a standard diagnostic fingerprint or pattern has been determined for a specific stage or progression profile of a neurological disease or condition using the selected oligonucleotide probes, this information can be used to identify the presence or absence of a specific stage or progression profile or the progression of a neurological disease or condition in a different test organism or individual.

[0137] To examine the gene expression pattern of a test sample, a test sample of tissue, body fluid or body waste (e.g. a blood sample containing cells), corresponding to the sample used for the preparation of the standard pattern, is obtained from a patient or the organism to be studied. A test gene transcript pattern is then prepared as described hereinbefore as for the standard pattern.

[0138] In a further aspect therefore, the present invention provides a method of preparing a test gene transcript pattern comprising at least the steps of:

[0139] a) isolating mRNA from a blood sample (e.g. containing cells) of said test organism, which may optionally be reverse transcribed to cDNA;

[0140] b) hybridizing the mRNA or cDNA of step (a) to a set of oligonucleotides or a kit as described hereinbefore specific for a specific stage or progression profile of a neurological disease or condition in an organism and sample thereof corresponding to the organism and sample thereof under investigation; and

[0141] c) assessing the amount of mRNA or cDNA hybridizing to each of said probes to produce said pattern reflecting the level of gene expression of genes to which said oligonucleotides bind, in said test sample.

[0142] As described hereinbefore, the set of probes or kit may contain uninformative secondary probes.

[0143] In a preferred aspect, said method is performed using primers which amplify the mRNA or cDNA or a part thereof and the amount of amplified product is assessed to produce the pattern. As described hereinbefore, both labelled probes and primers may be used in preferred aspects of the invention.

[0144] This test pattern may then be compared to one or more standard patterns to assess whether the sample contains cells which exhibit gene expression indicative of the individual having a specific stage or progression profile of a neurological disease or condition.

[0145] Thus viewed from a further aspect the present invention provides a method of diagnosing or identifying or monitoring a specific stage or progression profile of a neurological disease or condition in an organism, comprising the steps of:

[0146] a) isolating mRNA from a blood sample (e.g. containing cells) of said organism, which may optionally be reverse transcribed to cDNA;

[0147] b) hybridizing the mRNA or cDNA of step (a) to a set of oligonucleotides or a kit as described hereinbefore specific for a specific stage or progression profile of a neurological disease or condition in an organism and sample thereof corresponding to the organism and sample thereof under investigation;

[0148] c) assessing the amount of mRNA or cDNA hybridizing to each of said probes to produce a characteristic pattern reflecting the level of gene expression of genes to which said oligonucleotides bind, in said sample; and

[0149] d) comparing said pattern to a standard diagnostic pattern prepared according to the method of the invention using a sample from an organism corresponding to the organism and sample under investigation to determine the degree of correlation indicative of the presence of a specific stage or progression profile of a neurological disease or condition in the organism under investigation.

[0150] As described hereinbefore, the set of probes or kit may contain uninformative secondary probes.

[0151] The method up to and including step c) is the preparation of a test pattern as described above.

[0152] Methods of identifying a specific progression profile that is predictive of the expected progression of a neurological disease or condition has not previously been disclosed in the art. Thus in a further aspect the present invention provides a method of diagnosing or identifying a specific progression profile of a neurological disease or condition in an organism, comprising the steps of:

[0153] a) isolating mRNA from a blood sample (e.g. containing cells) of said organism, which may optionally be reverse transcribed to cDNA;

[0154] b) hybridizing the mRNA or cDNA of step (a) to a set of oligonucleotides or a kit comprising oligonucleotides specific for a specific progression profile of a neurological disease or condition in an organism and sample thereof corresponding to the organism and sample thereof under investigation;

[0155] c) assessing the amount of mRNA or cDNA hybridizing to each of said probes to produce a characteristic pattern reflecting the level of gene expression of genes to which said oligonucleotides bind, in said sample; and

[0156] d) comparing said pattern to a standard diagnostic pattern prepared according to the method of the invention using a sample from an organism corresponding to the organism and sample under investigation and a set of oligonucleotides or a kit as defined in step b) to determine the degree of correlation indicative of the presence of a specific progression profile of a neurological disease or condition in the organism under investigation.

[0157] In step d) the standard diagnostic pattern is prepared according to methods described herein, but using a set of oligonucleotides or kit as described in step d). The invention also extends to such methods of preparing standard diagnostic patterns.

[0158] In a preferred aspect, said method is performed using primers which amplify the mRNA or cDNA or a part thereof and the amount of amplified product is assessed to produce the pattern. As described hereinbefore, both labelled probes and primers may be used in preferred aspects of the invention.

[0159] As referred to herein, “diagnosis” or “identification” refers to determination of the presence or existence of the specific stage or progression profile of a neurological disease or condition in an organism. “Monitoring” refers to repeated assessments over a period of time to assess the stage or progression of the disorder or disease over time, particularly when an individual is known to be suffering from a neurological condition or disease, for example to monitor the effects of treatment or the progression of the condition or disease, e.g. to determine the suitability of a treatment or provide a prognosis. In a preferred aspect, the patient may be monitored after or during treatment, to determine the efficacy of the treatment, e.g. by reversion to normal patterns of expression. Alternatively the monitoring may allow the optimization of drug dosage or to identify compounds suitable for treatment. The methods also allow the identification of patients suitable for clinical trails as discussed hereinbefore.

[0160] Thus in one aspect the present invention provides a method of monitoring the progression of a neurological disease or condition in an organism, comprising the steps of:

[0161] a) isolating mRNA from a blood sample (e.g. containing cells) of said organism, which may optionally be reverse transcribed to cDNA;

[0162] b) hybridizing the mRNA or cDNA of step (a) to a set of oligonucleotides or a kit as described hereinbefore specific for a specific stage of a neurological disease or condition in an organism and sample thereof corresponding to the organism and sample thereof under investigation;

[0163] c) assessing the amount of mRNA or cDNA hybridizing to each of said probes to produce a characteristic pattern reflecting the level of gene expression of genes to which said oligonucleotides bind, in said sample;

[0164] d) comparing said pattern to a standard diagnostic pattern prepared according to to a method of the invention using a sample from an organism corresponding to the organism and sample under investigation to determine the degree of correlation indicative of the specific stage of a neurological disease or condition in the organism under investigation;

[0165] e) after a time interval, repeating steps a) to d);

[0166] f) comparing the specific stage of the disease or condition identified before and after the time interval to establish the progression of said disease or condition.

[0167] Conveniently said time interval is at least 3, 6, 12, 18, 24 or 36 months.

[0168] In a further preferred aspect the present invention provides a method of determining the efficacy of a treatment of a neurological disease or condition in an organism, comprising performing steps of a) to d) as described above, before, during, and/or after treatment of said neurological condition or disease in said organism to determine the efficacy of said treatment. The degree of correlation between the pattern generated for the samples taken before, after or during treatment and the standard pattern for a specific stage or progression profile will indicate whether there is any change in the pattern and hence the success of the treatment. Reversion to normal expression patterns (by comparison with normal standard patterns) are indicative of successful treatment. The present invention also provides a method of identifying a compound suitable for the treatment of a neurodegenerative condition or disease or a specific stage or progression profile thereof in an organism comprising the steps of:

[0169] a) identifying the stage or progression profile of said organism by a method of the invention,

[0170] b) administering said compound to said organism,

[0171] c) repeating step a) after step b),

[0172] d) comparing the stages or progression profiles identified in steps a) and c) to determine if any therapeutic benefit is observed in said organism relative to a comparable organism not treated by said compound.

[0173] The presence of a specific stage or progression profile of a neurodegenerative condition or disease may be determined by determining the degree of correlation between the standard and test samples' patterns. This necessarily takes into account the range of values which are obtained for normal and diseased samples. Although this can be established by obtaining standard deviations for several representative samples binding to the probes to develop the standard, it will be appreciated that single samples may be sufficient to generate the standard pattern to identify the specific stage or progression profile if the test sample exhibits close enough correlation to that standard. Conveniently, the presence, absence, or extent of a specific stage or progression profile in a test sample can be predicted by inserting the data relating to the expression level of informative probes in test sample into the standard diagnostic probe pattern established according to equation 1.

[0174] In a preferred aspect, the neurological condition is a dementia, preferably Alzheimer's disease. The stages of Alzheimer's disease may be divided into pre-clinical, prodromal Alzheimer's disease and dementia. As referred to herein, “prodromal” Alzheimer's disease is the pre-dementia stage of Alzheimer's disease which is the early symptomatic, pre-dementia phase in which there is episodic memory loss of the hippocampal type without affecting instrumental activities of daily living and biomarker evidence from CSF or imaging which supports pathological changes associated with Alzheimer's disease relative to age-matched individuals. (Dubois, et al., 2007, European Neurological Disease, p53-54). The methods may also be used to detect MCI. MCI is defined as GDS stage 2 or 3 or having a CDR of 0 to 0.5 (Petersen et al., 1999, Arch. Neurol., 56(3); p303-308; Petersen, 2011, N. Engl. J. Med., 364:23, p2227-22234; Morris, 1993, Neurology, 34, p2412-2413). CDR-SOB may also be used in the assessment (O'Bryant et al., 2008, Arch Neurol., 65(8), p1091-1095). Stable MCI as referred to herein is MCI that does not progress to dementia within 2 years. Converting MCI as referred to herein is MCI that does progress to dementia within 2 years.

[0175] In particularly preferred aspects of the invention, the stage of a neurodegenerative disease or disorder is MCI, e.g. stable MCI (which does not progress within 2 years) or converting MCI (which progresses to dementia within 2 years). Alternatively the stage may be prodromal dementia, e.g. prodromal Alzheimer's disease. These stages or their progression may be identified or monitored.

[0176] The progression profile is preferably a prodromal dementia or stable MCI. The progression profile may in some instances be the same as a stage of a disorder (where that stage has a known progression) but in other instances may provide information on whether progression to a later stage of the disease or disorder can be expected.

[0177] In particularly preferred aspects of the invention, said diagnosing or identification or monitoring of a specific stage or progression profile is carried out by comparing, in accordance with methods described hereinbefore:

(i) test patterns of organisms with MCI (or unscreened test organisms) with standard patterns from organisms with stable MCI, converting MCI, MCI, prodromal Alzheimer's disease, Alzheimer's disease and/or healthy organisms;
(ii) test patterns of organisms with a stage of dementia, e.g. Alzheimer's disease with standard patterns from organisms with various stages of dementia, e.g. Alzheimer's disease (e.g. very mild, mild, moderate or severe);
(iii) test pattern of an organism with Alzheimer's disease with standard patterns from organisms with various stages or progression profiles of Alzheimer's disease.

[0178] To provide a predictive progression comparisons are made to standard patterns from progression profiles of Alzheimer's disease. However, for retrospective determinations of Alzheimer's disease progression, two determinations are made, e.g. of the type indicated in (i) to (iii) and the results compared as a function of time.

[0179] The above tests allow the identification of the following stages: prodromal AD or stable MCI in a test individual with MCI; prodromal AD or AD in a test individual; MCI (of any form) in a test individual. The following stages may be detected which may be used to follow progression: Prodromal AD or progressed AD; very mild AD or mild AD, very mild or mild dementia, AD with clear progression or AD with no clear progression. The tests also allow the diagnosis of AD.

[0180] The following progression profiles may be detected: MCI that will convert to AD; very mild AD that will convert to mild AD; moderate AD that will convert to severe AD.

[0181] As described in the Examples, the sub-sets of probes from Table 1 have preferred utilities according to the invention. Thus for example, in a preferred aspect in said diagnostic method said organism has MCI and the pattern that is generated for said organism is compared to standard patterns for stable MCI and converting MCI and said set of probes comprises at least 10 Table 2 oligonucleotides or their derived, complementary or functionally equivalent oligonucleotides. Similarly the Table 2 probes may be used to generate standard patterns for stable and converting MCI. The table below provides other preferred aspects of the invention for use in generating standard patterns and performing diagnostic methods according to the invention.

| Table | Test sample | Standard patterns |
|---|---|---|
| 2, 3, 4 | MCI | MCI stable |
| | | MCI converter |
| 5 | Any | Non-AD |
| | | AD |
| 6 | Any | MCI |
| | | Non-MCI |
| 7 | AD | Prodromal AD |
| | | Progressed AD |
| 8 | Dementia | Very mild dementia |
| | | Mild dementia |
| 9 | AD | Predicted: |
| | | Clear progression |
| | | Non-clear progression |
| 10, 11 | AD | Retrospective: |
| | | Clear progression |
| | | Non-clear progression |

[0182] In a further preferred aspect, probes exhibiting higher significance (e.g. <0.5), i.e. the probes shown in tables with an asterisk may be used instead of the full set of probes.

[0183] Furthermore, as discussed hereinbefore, the 10 or more probes which are selected are preferably probes which are common to one or more of the Tables described herein, e.g. Tables 2 and 3 or Table 9 and 10. Core probes may be selected based on a p-value of <0.5, to which additional probes may be added from relevant Tables. Each table of probes may also form a core group of probes (e.g. Table 3), to which additional probes may be added, e.g. one or probes from Table 2, in particular those exhibiting a p-value of <0.5.

[0184] In a particularly preferred aspect, probes for which sequences are provided in the tables are preferred. Context sequences are provided for all sequences. However the full length sequences for Assay0555 (Table 5) and Assay0397 (Table 2) are missing. Thus probes from these Tables but omitting probes from sequences relating to those Assay Nos. are preferred.

[0185] Furthermore, whilst the context sequences differ, some of the full length sequences in the tables are duplicated. Thus the full length sequences for the following pairs (and triplicates) of assays are identical:

### ASSAY0128 ASSAY0797

### ASSAY0381 ASSAY1093

### ASSAY0142 ASSAY0885

### ASSAY0207 ASSAY0802

### ASSAY0745 ASSAY1094

### ASSAY0771 ASSAY0772

### ASSAY0476 ASSAY1095

### ASSAY0002 ASSAY0098

### ASSAY0535 ASSAY1103

### ASSAY0355 ASSAY0651

### ASSAY0445 ASSAY0464

### ASSAY0378 ASSAY0897

### ASSAY0534 ASSAY1082

### ASSAY0215 ASSAY0767

### ASSAY0637 ASSAY1097

### ASSAY0911 ASSAY0928

### ASSAY0625 ASSAY1084

### ASSAY0257 ASSAY0792

### ASSAY0577 ASSAY0969

### ASSAY0209 ASSAY0818

### ASSAY0269 ASSAY0794

### ASSAY0642 ASSAY1104

### ASSAY0668 ASSAY0684

### ASSAY0919 ASSAY1083

### ASSAY0709 ASSAY1101

### ASSAY0267 ASSAY0421

### ASSAY0199 ASSAY0766; and

### ASSAY0196 ASSAY0853 ASSAY1074

[0186] In a preferred aspect the 10 or more probes which are selected include only one probe from the two Assay Nos in each of the above pairs of Assay Nos, i.e. each of the probes in the 10 or more probes is from a unique sequence.

[0187] Data generated using the above mentioned methods may be analysed using various techniques from the most basic visual representation (e.g. relating to intensity) to more complex data manipulation to identify underlying patterns which reflect the interrelationship of the level of expression of each gene to which the various probes bind, which may be quantified and expressed mathematically. Conveniently, the raw data thus generated may be manipulated by the data processing and statistical methods described hereinafter, particularly normalizing and standardizing the data and fitting the data to a classification model to determine whether said test data reflects the pattern of a specific stage or progression profile of a neurodegenerative condition or disease.

[0188] The methods described herein may be used to identify, monitor or diagnose a specific stage or progression profile of a neurodegenerative condition or disease, for which the oligonucleotide probes are informative. “Informative” probes as described herein, are those which reflect genes which have altered expression in the specific stage or progression profile of the neurodegenerative condition or disease. Individual probes described herein may not be sufficiently informative for diagnostic purposes when used alone, but are informative when used as one of several probes to provide a characteristic pattern, e.g. in a set as described hereinbefore.

[0189] Thus in a further aspect the present invention provides a set of probes as described hereinbefore for use in diagnosis or identification or monitoring of a specific stage or progression profile of a neurodegenerative disease or condition.

[0190] The diagnostic method may be used alone as an alternative to other diagnostic techniques or in addition to such techniques. For example, methods of the invention may be used as an alternative or additive diagnostic measure to diagnosis using for example cognitive testing, CSF biomarkers, APOE genotyping or brain volumetric measures (Gomar et al., 2011, Arch. Gen Psychiatry, 68(9), p961-969) for example in the identification and/or diagnosis of specific stages or progression profiles of a neurodegenerative disease or condition. In a preferred aspect the method of the invention is used in conjunction with PET imaging, e.g. for early stage AD diagnosis.

[0191] The methods of the invention may be performed on cells from prokaryotic or eukaryotic organisms which may be any eukaryotic organisms such as human beings, other mammals and animals, birds, insects, fish and plants, and any prokaryotic organism such as a bacteria.

[0192] Preferred non-human animals on which the methods of the invention may be conducted include, but are not limited to mammals, particularly primates, domestic animals, livestock and laboratory animals. Thus preferred animals for diagnosis include mice, rats, guinea pigs, cats, dogs, pigs, cows, goats, sheep, horses. Particularly preferably a human is diagnosed, identified or monitored according to the methods above.

[0193] As described above, the sample under study may be any convenient sample which may be obtained from an organism. Preferably however, as mentioned above, the sample is obtained from a site distant to the site of disease and the cells in such samples are not disease cells, have not been in contact with such cells and do not originate from the site of the disease. In such cases, although preferably absent, the sample may contain cells which do not fulfil these criteria. However, since the probes of the invention are concerned with transcripts whose expression is altered in cells which do satisfy these criteria, the probes are specifically directed to detecting changes in transcript levels in those cells even if in the presence of other, background cells.

[0194] Whilst in a preferred aspect the methods of assessment concern the development of a gene transcript pattern from a test sample and comparison of the same to a standard pattern, the elevation or depression of expression of certain markers may also be examined by examining the products of expression and the level of those products. Thus a standard pattern in relation to the expressed product may be generated.

[0195] In such methods the levels of expression of a set of polypeptides encoded by the gene to which an oligonucleotide or a derived oligonucleotide as defined hereinbefore, binds, are analysed.

[0196] Various diagnostic methods may be used to assess the amount of polypeptides (or fragments thereof) which are present. The presence or concentration of polypeptides may be examined, for example by the use of a binding partner to said polypeptide (e.g. an antibody), which may be immobilized, to separate said polypeptide from the sample and the amount of polypeptide may then be determined. The Gene IDs disclosed in the tables may be used to determine whether antibodies to the relevant polypeptides are available. Information on the genes may be obtained for example at www.genecards.org

[0197] “Fragments” of the polypeptides refers to a domain or region of said polypeptide, e.g. an antigenic fragment, which is recognizable as being derived from said polypeptide to allow binding of a specific binding partner. Preferably such a fragment comprises a significant portion of said polypeptide and corresponds to a product of normal post-synthesis processing.

[0198] Thus in a further aspect the present invention provides a method of preparing a standard gene transcript expression pattern characteristic of a neurological disease or condition with a specific stage or progression profile in an organism comprising at least the steps of:

[0199] a) releasing target polypeptides from a sample (e.g. blood or CSF) of one or more organisms having said neurological disease or condition with a specific stage or progression profile;

[0200] b) contacting said target polypeptides with one or more binding partners, wherein each binding partner is specific to a marker polypeptide (or a fragment thereof) encoded by the gene to which an oligonucleotide (or derived sequence) as defined hereinbefore binds, to allow binding of said binding partners to said target polypeptides, wherein said marker polypeptides are specific for said neurological disease or condition with a specific stage or progression profile in an organism and sample thereof corresponding to the organism and sample thereof under investigation; and

[0201] c) assessing the target polypeptide binding to said binding partners to produce a characteristic pattern reflecting the level of gene expression of genes which express said marker polypeptides, in the sample with said neurological disease or condition with a specific stage or progression profile.

[0202] Preferably at least 10 binding partners are used (in the above method or methods described below) or more as defined in relation to the number of oligonucleotide probes in the sets defined hereinbefore. The oligonucleotide which binds to the gene refers to an oligonucleotide probe as described hereinbefore. Preferred oligonucleotide probes or sets of probes, which bind to genes which encode marker polypeptides to which binding partners as referred to herein bind, are as described hereinbefore. Thus sets of binding partners may be used which correspond to the sets of oligonucleotide probes described herein.

[0203] As used herein “target polypeptides” refer to those polypeptides present in a sample which are to be detected and “marker polypeptides” are polypeptides which are encoded by the genes to which oligonucleotides or derived oligonucleotides as defined hereinbefore bind: The target and marker polypeptides are identical or at least have areas of high similarity, e.g. epitopic regions to allow recognition and binding of the binding partner.

[0204] “Release” of the target polypeptides refers to appropriate treatment of a sample to provide the polypeptides in a form accessible for binding of the binding partners, e.g. by lysis of cells where these are present. The samples used in this case need not necessarily comprise cells as the target polypeptides may be released from cells into the surrounding tissue or fluid, and this tissue or fluid may be analysed, e.g. whole blood, serum or plasma. Preferably however the preferred samples as described herein are used, e.g. CSF or blood. “Binding partners” comprise the separate entities which together make an affinity binding pair as described above, wherein one partner of the binding pair is the target or marker polypeptide and the other partner binds specifically to that polypeptide, e.g. an antibody.

[0205] Various arrangements may be envisaged for detecting the amount of binding pairs which form. In its simplest form, a sandwich type assay e.g. an immunoassay such as an ELISA, may be used in which an antibody specific to the polypeptide and carrying a label (as described elsewhere herein) may be bound to the binding pair (e.g. the first antibody:polypeptide pair) and the amount of label detected.

[0206] Other methods as described herein may be similarly modified for analysis of the protein product of expression rather than the gene transcript and related nucleic acid molecules.

[0207] Thus a further aspect of the invention provides a method of preparing a test gene transcript expression pattern comprising at least the steps of:

[0208] a) releasing target polypeptides from a sample (e.g. blood or CSF) of said test organism;

[0209] b) contacting said target polypeptides with one or more binding partners, wherein each binding partner is specific to a marker polypeptide (or a fragment thereof) encoded by the gene to which an oligonucleotide (or derived sequence) as defined hereinbefore binds, to allow binding of said binding partners to said target polypeptides, wherein said marker polypeptides are specific for a specific stage or progression profile of a neurological disease or condition in an organism and sample thereof corresponding to the organism and sample thereof under investigation; and

[0210] c) assessing the target polypeptide binding to said binding partners to produce a characteristic pattern reflecting the level of gene expression of genes which express said marker polypeptides, in said test sample.

[0211] A yet further aspect of the invention provides a method of diagnosing or identifying or monitoring a specific stage or progression profile of a neurological disease or condition in an organism comprising the steps of:

[0212] a) releasing target polypeptides from a sample (e.g. blood or CSF) of said organism;

[0213] b) contacting said target polypeptides with one or more binding partners, wherein each binding partner is specific to a marker polypeptide (or a fragment thereof) encoded by the gene to which an oligonucleotide (or derived sequence) as defined hereinbefore binds, to allow binding of said binding partners to said target polypeptides, wherein said marker polypeptides are specific for a specific stage or progression profile of a neurological disease or condition in an organism and sample thereof corresponding to the organism and sample thereof under investigation; and

[0214] c) assessing the target polypeptide binding to said binding partners to produce a characteristic pattern reflecting the level of gene expression of genes which express said marker polypeptides in said sample; and

[0215] d) comparing said pattern to a standard diagnostic pattern prepared as described hereinbefore using a sample from an organism corresponding to the organism and sample under investigation to determine the degree of correlation indicative of the presence of a specific stage or progression profile of a neurological disease or condition in the organism under investigation.

[0216] MicroRNA profiling may be used to develop a pattern characteristic of a specific stage or progression profile of a neurodegenerative disease or disorder as defined above. miRNA microarrays suitable for this purpose are known in the art. In particular miRNA that regulate the genes corresponding to the probes described herein may be used to generate miRNA patterns associated with a specific stage or progression profile.

[0217] The methods of generating standard and test patterns and diagnostic techniques rely on the use of informative oligonucleotide probes to generate the gene expression data. In some cases it will be necessary to select these informative probes for a particular method, e.g. to diagnose a specific stage or progression profile of a neurological condition or disorder, from a selection of available probes, e.g. the Table 1 oligonucleotides, the Table 1 derived oligonucleotides, their complementary sequences and functionally equivalent oligonucleotides. Said derived oligonucleotides include oligonucleotides derived from the genes corresponding to the sequences provided in those tables for which gene identifiers are provided. The following methodology describes a convenient method for identifying such informative probes, or more particularly how to select a suitable sub-set of probes from the probes described herein.

[0218] Probes for the analysis of a particular stage or progression profile, may be identified in a number of ways known in the prior art, including by differential expression or by library subtraction (see for example WO98/49342). As described in WO04/046382 and as described hereinafter, in view of the high information content of most transcripts, as a starting point one may also simply analyse a random sub-set of mRNA or cDNA species corresponding to the probes described herein and pick the most informative probes from that sub-set.

[0219] The following method describes the use of immobilized oligonucleotide probes (e.g. the probes of the invention) to which mRNA (or related molecules) from different samples are bound to identify which probes are the most informative to identify a specific stage or progression profile, e.g. a disease sample. Alternatively, the sub-sets described hereinbefore may be used for the methods described herein. The method below describes how to identify sub-sets of probes from those which are disclosed herein or how to identify additional informative probes that could be used in conjunction with probes disclosed herein. The method also describes the statistical methods used for diagnosis of samples once the probes have been selected.

[0220] The immobilized probes can be derived from various unrelated or related organisms; the only requirement is that the immobilized probes should bind specifically to their homologous counterparts in test organisms. Probes can also be derived or selected from commercially available or public databases and immobilized on solid supports, or as mentioned above they can be randomly picked and isolated from a cDNA library and immobilized on a solid support.

[0221] The length of the probes immobilised on the solid support should be long enough to allow for specific binding to the target sequences. The immobilised probes can be in the form of DNA, RNA or their modified products or PNAs (peptide nucleic acids). Preferably, the probes immobilised should bind specifically to their homologous counterparts representing highly and moderately expressed genes in test organisms. Conveniently the probes which are used are the probes described herein.

[0222] The gene expression pattern of cells in biological samples can be generated using prior art techniques such as microarray or macroarray as described below or using methods described herein. Several technologies have now been developed for monitoring the expression level of a large number of genes simultaneously in biological samples, such as, high-density oligoarrays (Lockhart et al., 1996, Nat. Biotech., 14, p1675-1680), cDNA microarrays (Schena et al, 1995, Science, 270, p467-470) and cDNA macroarrays (Maier E et al., 1994, Nucl. Acids Res., 22, p3423-3424; Bernard et al., 1996, Nucl. Acids Res., 24, p1435-1442).

[0223] In high-density oligoarrays and cDNA microarrays, hundreds and thousands of probe oligonucleotides or cDNAs, are spotted onto glass slides or nylon membranes, or synthesized on biochips. The mRNA isolated from the test and reference samples are labelled by reverse transcription with a red or green fluorescent dye, mixed, and hybridised to the microarray. After washing, the bound fluorescent dyes are detected by a laser, producing two images, one for each dye. The resulting ratio of the red and green spots on the two images provides the information about the changes in expression levels of genes in the test and reference samples. Alternatively, single channel or multiple channel microarray studies can also be performed.

[0224] The generated gene expression data needs to be preprocessed since, several factors can affect the quality and quantity of the hybridising signals. For example, variations in the quality and quantity of mRNA isolated from sample to sample, subtle variations in the efficiency of labelling target molecules during each reaction, and variations in the amount of unspecific binding between different microarrays can all contribute to noise in the acquired data set that must be corrected for prior to analysis. For example, measurements with low signal /noise ratio can be removed from the data set prior to analysis.

[0225] The data can then be transformed for stabilizing the variance in the data structure and normalized for the differences in probe intensity. Several transformation techniques have been described in the literature and a brief overview can be found in Cui, Kerr and Churchill http://www.jax.org/research/churchill/research/expression/Cui-Transform.pdf. Several methods have been described for normalizing gene expression data (Richmond and Somerville, 2000, Current Opin. Plant Biol., 3, p108-116; Finkelstein et al., 2001, In “Methods of Microarray Data Analysis. Papers from CAMDA, Eds. Lin & Johnsom, Kluwer Academic, p57-68; Yang et al., 2001, In “Optical Technologies and Informatics”, Eds. Bittner, Chen, Dorsel & Dougherty, Proceedings of SPIE, 4266, p141-152; Dudoit et al, 2000, J. Am. Stat. Ass., 97, p77-87; Alter et al 2000, supra; Newton et al., 2001, J. Comp. Biol., 8, p37-52). Generally, a scaling factor or function is first calculated to correct the intensity effect and then used for normalising the intensities. The use of external controls has also been suggested for improved normalization.

[0226] One other major challenge encountered in large-scale gene expression analysis is that of standardization of data collected from experiments performed at different times. We have observed that gene expression data for samples acquired in the same experiment can be efficiently compared following background correction and normalization. However, the data from samples acquired in experiments performed at different times requires further standardization prior to analysis. This is because subtle differences in experimental parameters between different experiments, for example, differences in the quality and quantity of mRNA extracted at different times, differences in time used for target molecule labelling, hybridization time or exposure time, can affect the measured values. Also, factors such as the nature of the sequence of transcripts under investigation (their GC content) and their amount in relation to the each other determines how they are affected by subtle variations in the experimental processes. They determine, for example, how efficiently first strand cDNAs, corresponding to a particular transcript, are transcribed and labelled during first strand synthesis, or how efficiently the corresponding labelled target molecules bind to their complementary sequences during hybridization. Batch to batch differences in the manufacturing lots is also a major factor for variation in the generated expression data.

[0227] Failure to properly address and rectify for these influences leads to situations where the differences between the experimental series may overshadow the main information of interest contained in the gene expression data set, i.e. the differences within the combined data from the different experimental series. Hence, when required the expression data should be batch-adjusted prior to data analysis.

[0228] Monitoring the expression of a large number of genes in several samples leads to the generation of a large amount of data that is too complex to be easily interpreted. Several unsupervised and supervised multivariate data analysis techniques have already been shown to be useful in extracting meaningful biological information from these large data sets. Cluster analysis is by far the most commonly used technique for gene expression analysis, and has been performed to identify genes that are regulated in a similar manner, and or identifying new/unknown tumour classes using gene expression profiles (Eisen et al., 1998, PNAS, 95, p14863-14868, Alizadeh et al. 2000, supra, Perou et al. 2000, Nature, 406, p747-752; Ross et al, 2000, Nature Genetics, 24(3), p227-235; Herwig et al., 1999, Genome Res., 9, p1093-1105; Tamayo et al, 1999, Science, PNAS, 96, p2907-2912).

[0229] In the clustering method, genes are grouped into functional categories (clusters) based on their expression profile, satisfying two criteria: homogeneity—the genes in the same cluster are highly similar in expression to each other; and separation—genes in different clusters have low similarity in expression to each other.

[0230] Examples of various clustering techniques that have been used for gene expression analysis include hierarchical clustering (Eisen et al., 1998, supra; Alizadeh et al. 2000, supra; Perou et al. 2000, supra; Ross et al, 2000, supra), K-means clustering (Herwig et al., 1999, supra; Tavazoie et al, 1999, Nature Genetics, 22(3), p. 281-285), gene shaving (Hastie et al., 2000, Genome Biology, 1(2), research 0003.1-0003.21), block clustering (Tibshirani et al., 1999, Tech report Univ Stanford.) Plaid model (Lazzeroni, 2002, Stat. Sinica, 12, p61-86), and self-organizing maps (Tamayo et al. 1999, supra). Also, related methods of multivariate statistical analysis, such as those using the singular value decomposition (Alter et al., 2000, PNAS, 97(18), p10101-10106; Ross et al. 2000, supra) or multidimensional scaling can be effective at reducing the dimensions of the objects under study.

[0231] However, methods such as cluster analysis and singular value decomposition are purely exploratory and only provide a broad overview of the internal structure present in the data. They are unsupervised approaches in which the available information concerning the nature of the class under investigation is not used in the analysis. Often, the nature of the biological perturbation to which a particular sample has been subjected is known. For example, it is sometimes known whether the sample whose gene expression pattern is being analysed derives from a diseased or healthy individual. In such instances, discriminant analysis can be used for classifying samples into various groups based on their gene expression data.

[0232] In such an analysis one builds the classifier by training the data that is capable of discriminating between member and non-members of a given class. The trained classifier can then be used to predict the class of unknown samples. Examples of discrimination methods that have been described in the literature include Support Vector Machines (Brown et al, 2000, PNAS, 97, p262-267), Nearest Neighbour (Dudoit et al., 2000, supra), Classification trees (Dudoit et al., 2000, supra), Voted classification (Dudoit et al., 2000, supra), Weighted Gene voting (Golub et al. 1999, supra), and Bayesian classification (Keller et al. 2000, Tec report Univ of Washington). Also a technique in which PLS (Partial Least Square) regression analysis is first used to reduce the dimensions in the gene expression data set followed by classification using logistic discriminant analysis and quadratic discriminant analysis (LD and ODA) has been described (Nguyen & Rocke, 2002, Bioinformatics, 18, p39-50 and 1216-1226).

[0233] A challenge that gene expression data poses to classical discriminatory methods is that the number of genes whose expression are being analysed is very large compared to the number of samples being analysed. However in most cases only a small fraction of these genes are informative in discriminant analysis problems. Moreover, there is a danger that the noise from irrelevant genes can mask or distort the information from the informative genes. Several methods have been suggested in literature to identify and select genes that are informative in microarray studies, for example, t-statistics (Dudoit et al, 2002, J. Am. Stat. Ass., 97, p77-87), analysis of variance (Kerr et al., 2000, PNAS, 98, p8961-8965), Neighbourhood analysis (Golub et al, 1999, supra), Ratio of between groups to within groups sum of squares (Dudoit et al., 2002, supra), Non parametric scoring (Park et al., 2002, Pacific Symposium on Biocomputing, p52-63) and Likelihood selection (Keller et al., 2000, supra).

[0234] In the methods described herein the gene expression data that has been normalized and standardized is analysed by using Partial Least Squares Regression (PLSR). Although PLSR is primarily a method used for regression analysis of continuous data, it can also be utilized as a method for model building and discriminant analysis using a dummy response matrix based on a binary coding. The class assignment is based on a simple dichotomous distinction such as healthy (class 1)/prodromal Alzheimer's disease (class 2), or a multiple distinction based on multiple disease diagnosis such as prodromal Alzheimer's disease (class 1)/stable MCI (class 2)/healthy (class 3). The list of diseases for classification can be increased depending upon the samples available corresponding to other cancers or stages thereof.

[0235] PLSR applied as a classification method is referred to as PLS-DA (DA standing for Discriminant analysis). PLS-DA is an extension of the PLSR algorithm in which the Y-matrix is a dummy matrix containing n rows (corresponding to the number of samples) and K columns (corresponding to the number of classes). The Y-matrix is constructed by inserting 1 in the kth column and −1 in all the other columns if the corresponding ith object of X belongs to class k. By regressing Y onto X, classification of a new sample is achieved by selecting the group corresponding to the largest component of the fitted, ŷ(x)=(ŷ₁(x), ŷ₂(x), . . . , ŷₖ(x)). Thus, in a −1/1 response matrix, a prediction value below 0 means that the sample belongs to the class designated as −1, while a prediction value above 0 implies that the sample belongs to the class designated as 1.

[0236] It is usually recommended to use PLS-DA as a starting point for the classification problem due to its ability to handle collinear data, and the property of PLSR as a dimension reduction technique. Once this purpose has been satisfied, it is possible to use other methods such as Linear discriminant analysis, LDA, that has been shown to be effective in extracting further information, Indahl et al. (1999, Chem. and Intell. Lab. Syst., 49, p19-31). This approach is based on first decomposing the data using PLS-DA, and then using the scores vectors (instead of the original variables) as input to LDA. Further details on LDA can be found in Duda and Hart (Classification and Scene Analysis, 1973, Wiley, USA).

[0237] The next step following model building is of model validation. This step is considered to be amongst the most important aspects of multivariate analysis, and tests the “goodness” of the calibration model which has been built. In this work, a cross validation approach has been used for validation. In this approach, one or a few samples are kept out in each segment while the model is built using a full cross-validation on the basis of the remaining data. The samples left out are then used for prediction/classification. Repeating the simple cross-validation process several times holding different samples out for each cross-validation leads to a so-called double cross-validation procedure. This approach has been shown to work well with a limited amount of data, as is the case in the Examples described here. Also, since the cross validation step is repeated several times the dangers of model bias and overfitting are reduced.

[0238] Once a calibration model has been built and validated, genes exhibiting an expression pattern that is most relevant for describing the desired information in the model can be selected by techniques described in the prior art for variable selection, as mentioned elsewhere. Variable selection will help in reducing the final model complexity, provide a parsimonious model, and thus lead to a reliable model that can be used for prediction. Moreover, use of fewer genes for the purpose of providing diagnosis will reduce the cost of the diagnostic product. In this way informative probes which would bind to the genes of relevance may be identified.

[0239] We have found that after a calibration model has been built, statistical techniques like Jackknife (Effron, 1982, The Jackknife, the Bootstrap and other resampling plans. Society for Industrial and Applied mathematics, Philadelphia, USA), based on resampling methodology, can be efficiently used to select or confirm significant variables (informative probes). The approximate uncertainty variance of the PLS regression coefficients B can be estimated by:

$${S}^{2} B = {\sum }_{m = 1}^{M} {( ( B - {B}_{m} ) g )}^{2}$$

where
S²B=estimated uncertainty variance of B;
B=the regression coefficient at the cross validated rank A using all the N objects;
Bₘ=the regression coefficient at the rank A using all objects except the object(s) left out in cross validation segment m; and
g=scaling coefficient (here: g=1).

[0240] In our approach, Jackknife has been implemented together with cross-validation. For each variable the difference between the B-coefficients Bᵢ in a cross-validated sub-model and Bₜₒₜ for the total model is first calculated. The sum of the squares of the differences is then calculated in all sub-models to obtain an expression of the variance of the Bᵢ estimate for a variable. The significance of the estimate of Bᵢ is calculated using the t-test. Thus, the resulting regression coefficients can be presented with uncertainty limits that correspond to 2 Standard Deviations, and from that significant variables are detected.

[0241] No further details as to the implementation or use of this step are provided here since this has been implemented in commercially available software, The Unscrambler, CAMO ASA, Norway. Also, details on variable selection using Jackknife can be found in Westad & Martens (2000, J. Near Inf. Spectr., 8, p117-124).

[0242] The following approach can be used to select informative probes from a gene expression data set:

[0243] a) keep out one unique sample (including its repetitions if present in the data set) per cross validation segment;

[0244] b) build a calibration model (cross validated segment) on the remaining samples using PLSR-DA;

[0245] c) select the significant genes for the model in step b) using the Jackknife criterion;

[0246] d) repeat the above 3 steps until all the unique samples in the data set are kept out once (as described in step a). For example, if 75 unique samples are present in the data set, 75 different calibration models are built resulting in a collection of 75 different sets of significant probes;

[0247] e) optionally select the most significant variables using the frequency of occurrence criterion in the generated sets of significant probes in step d). For example, a set of probes appearing in all sets (100%) are more informative than probes appearing in only 50% of the generated sets in step d).

[0248] Once the informative probes for a disease have been selected, a final model is made and validated. The two most commonly used ways of validating the model are cross-validation (CV) and test set validation. In cross-validation, the data is divided into k subsets. The model is then trained k times, each time leaving out one of the subsets from training, but using only the omitted subset to compute error criterion, RMSEP (Root Mean Square Error of Prediction). If k equals the sample size, this is called “leave-one-out” cross-validation. The idea of leaving one or a few samples out per validation segment is valid only in cases where the covariance between the various experiments is zero. Thus, one sample at-a-time approach can not be justified in situations containing replicates since keeping only one of the replicates out will introduce a systematic bias to the analysis. The correct approach in this case will be to leave out all replicates of the same samples at a time since that would satisfy assumptions of zero covariance between the CV-segments.

[0249] The second approach for model validation is to use a separate test-set for validating the calibration model. This requires running a separate set of experiments to be used as a test set. This is the preferred approach given that real test data are available.

[0250] The final model is then used to identify the specific stage or progression profile of a neurological condition or disorder in test samples. For this purpose, expression data of selected informative genes is generated from test samples and then the final model is used to determine whether a sample belongs to a diseased or non-diseased class, i.e. whether the sample is from an individual with a specific stage or progression profile of a neurological condition or disorder.

[0251] Preferably a model for classification purposes is generated by using the data relating to the probes identified according to the above described method and/or the probes described hereinbefore. Such oligonucleotides may be of considerable length, e.g. if using cDNA (which is encompassed within the scope of the term “oligonucleotide”). The identification of such cDNA molecules as useful probes allows the development of shorter oligonucleotides which reflect the specificity of the cDNA molecules but are easier to manufacture and manipulate. Preferably the sample is as described previously.

[0252] The above described model may then be used to generate and analyse data of test samples and thus may be used for the diagnostic methods of the invention. In such methods the data generated from the test sample provides the gene expression data set and this is normalized and standardized as described above. This is then fitted to the calibration model described above to provide classification.

[0253] To identify genes that are expressed in high or moderate amount among the isolated population for use in methods of the invention, the information about the relative level of their transcripts in samples of interest can be generated using several prior art techniques. Both non-sequence based methods, such as differential display or RNA fingerprinting, and sequence-based methods such as microarrays or macroarrays can be used for the purpose. Alternatively, specific primer sequences for highly and moderately expressed genes can be designed and methods such as quantitative RT-PCR can be used to determine the levels of highly and moderately expressed genes. Hence, a skilled practitioner may use a variety of techniques which are known in the art for determining the relative level of mRNA in a biological sample.

[0254] Especially preferably the sample for the isolation of mRNA in the above described method is as described previously and is preferably not from the site of disease and the cells in said sample are not disease cells and have not contacted disease cells, for example the use of a peripheral blood sample.

[0255] The following examples are given by way of illustration only.

### Example 1

### Identification of Informative Probes and their Use to Assess and Monitor Various Stages and Progression Profiles in Alzheimer's Disease, Dementia and MCI

[0256] The present Example illustrates the utility of the probe sets described herein in the discrimination of various stages and progression profiles in Alzheimer's disease, dementia and MCI.

### Materials and Methods

[0257] This experiment involved the analysis of gene expression patterns from a partial genome screen of 1152 (384 assays×3 cards) gene probes with the following study cohorts:

[chemical structure]

[0258] Stable MCI: Subjects with stable MCI (i.e. without conversion to AD or other form of dementia) at baseline and after a minimum time period of 2 years were investigated. The study used the earliest available blood sample. At least 30 subjects were analyzed.

[0259] MCI conversion: Subjects were included that have a blood sample at the time of diagnosis with MCI and then received a diagnosis of AD at a follow-up session either 1 or 2 years post-baseline.

[0260] Alzheimer's disease: AD patients were monitored by conventional diagnostic testing and dementia graded as mild, moderate or severe AD, as appropriate. Transition through the groups, or based on an on-site clinical assessment, were considered a sign of progression. Suitable subjects were selected from the DiaGenic biobank.

[0261] Healthy controls: Healthy volunteers had at least 2 years of cognitive testing to ensure a stable healthy diagnosis.

### Subject Selection Criteria

[0262] Subjects were selected according to the criteria stated above.

### Compiled Clinical Data

[0263] For each donor in the study, information from the DiaGenic Information Management System (DIMS) was compiled including blood sample data, RNA data and relevant clinical data. In addition clinical progression as well as the scores of clinical dementia rating (global CDR) and CDR sum of boxes (CDR-SOB) have been recorded for the longitudinal AD cohort. Summaries of the cohort demographics are presented in Tables 12 to 14.

TABLE 12
Selected cohort demographic data (% F, age, MMSE and global CDR)

| | | Age | | MMSE | | Global CDR | |
|---|---|---|---|---|---|---|---|
| Cohort | % F | Mean | Min-Max | Mean | Min-Max | Mean | Min-Max |
| MCI conversion | 56 | 71.5 | 52-84 | 28 | 25-30 | 0.0 | 0.0-0.0 |
| Cognitively healthy | 56 | 68.2 | 52-79 | 30 | 29-30 | 0.0 | 0.0-0.0 |
| AD longitudinal baseline | 61 | 70.1 | 53-80 | 24 | 16-29 | 1.0 | 0.0-2.0 |
| AD longitudinal follow-up | 61 | 71.7 | 55-81 | 21 | 10-29 | 1.3 | 1.0-2.0 |
| MCI stable | 56 | 67.4 | 52-81 | 28 | 23-30 | 0.3 | 0.0-1.0 |
| Total | 58 | 70 | 52-84 | 26 | 10-30 | 1.0 | 0.0-2.0 |

TABLE 13
History of chronic illness

History of chronic illness?

| Cohort | No | Yes |
|---|---|---|
| MCI conversion | 3 | 23 |
| Cognitively healthy | 2 | 18 |
| AD longitudinal baseline | 2 | 22 |
| AD longitudinal follow-up | 5 | 26 |
| MCI stable | 8 | 19 |
| Total | 20 | 108 |

TABLE 14
Overview of the use of acetylcholinesterase inhibitor

| | Use of acetylcholinesterase inhibitor? | | | |
|---|---|---|---|---|
| Cohort | No | Yes | Unknown | Total |
| MCI conversion | 31 | 3 | 0 | 34 |
| Cognitively healthy | 32 | 0 | 0 | 32 |
| AD longitudinal baseline | 23 | 8 | 0 | 31 |
| AD longitudinal follow-up | 13 | 18 | 0 | 31 |
| MCI stable | 28 | 3 | 1 | 32 |
| Total | 127 | 32 | 1 | 160 |

### Sample Size

[0264] The cohort sample sizes are summarized in Table 15.

TABLE 15
Sample sizes

| Cohort | Sample size |
|---|---|
| MCI stable | 32 |
| MCI conversion | 34 |
| Longitudinal AD | 31 |
| Cognitively healthy | 32 |

### Procedures

### Apparatus and Equipment

| Instrument: | Instrument ID: |
|---|---|
| −70° C. freezer | 400-01/02/03/04 |
| Nanodrop | 120-01 |
| 2100 BioAnalyzer | 110-01 |
| Tetrad | 130-01 |
| ViiA7 Dx west | 100-04 |
| ViiA7 Dx east II | 100-10 |

### Test Materials, Standards and Reagents

| Reagents | Material no./Lot no. |
|---|---|
| PAXgene ™ Blood RNA Kit for | PreAnalytiX cat# 762174 |
| manual extraction | |
| RNA 6000 Nano assay kit | Agilent cat# 5067-1512 |
| RNA 6000 ladder | Agilent cat# 5067-1529 |
| High-capacity cDNA Reverse | Applied Biosystems cat# |
| Transciptase Kit | 4368813, lot no. 1101092 |
| TaqMan ® Universal PCR Master | Applied Biosystems cat# |
| Mix II (2X) with UNG | 4440038, lot no. 1012010 |
| Water mol biograde 5 Prime | Cat# 2500010 |
| RNAse away | Molecular BioProducts cat# |
| | 7002 |
| Antibac | 600521 |
| Reference material RM006 | In-house reference material |
| Reference material RM005 (for | In-house reference material |
| use with BCT-1 cards) | |
| Applied Biosystems TaqMan ® | |
| arrays 384-well format: | Custom ordered cards: |
| MFC card 1 | Batch no. A6709 |
| MFC card 2 | Batch no. A6707 |
| MFC card 3 | Batch no. A6727 |
| Applied Biosystems TaqMan ® arrays | |
| 4 × 96-well format: | Custom ordered cards: |
| BCT-1 | A5709 |

### Blood Samples

[0267] The blood samples were collected in PAXgene™ tubes (PreAnalytiX, Hombrechtikon, Switzerland) and left overnight at room temperature before storing at −80° C. until use.

### RNA Extraction and Quality Control

[0268] Total RNA was extracted from the blood samples, quality controlled and subsequently stored at ≦−70° C. prior to further processing.

[0269] cDNA Synthesis

[0270] 2210 ng total PAXgene blood RNA was required for one cDNA synthesis for gene expression analysis on the entire set of MFCs (3×384-array cards).

[0271] The cDNA syntheses were performed in one day for the primary run and in one day for the rerun samples. The cDNA was prepared with the following specifics for the present study:

[0272] The volumes of the components used to prepare the master mix for the cDNA reverse transcription for all samples including reference material is presented in Table 16.

TABLE 16
Volume of components used to prepare cDNA the master mix

| Component | Volume (μl) per reaction |
|---|---|
| 10X Reverse Transcription Buffer | 26 |
| 25X dNTPs | 10.4 |
| 10X random primers | 26 |
| Multiscribe Reverse Transriptase, 50 U/μl | 13 |
| Nuclease-free H₂O | 54.6 |
| Total per reaction | 130 |

[0273] For each sample specific cDNA master mix, water was added to 1.5 ml eppendorf tubes. The cDNA master mix was prepared for all samples and distributed as 130 μl aliquots in the tubes already containing water. Finally, RNA was added to master mix aliquots to a total volume of 260 μl. The final concentration of RNA in the cDNA reaction mixture was 8.5 ng/μl.

[0274] PCR strips of 8 wells were used for cDNA synthesis. All cDNA syntheses for the primary run and the rerun samples were prepared during the course of one day, respectively, but the cDNA syntheses were prepared in several blocks on the Tetrad thermocycler. After the cDNA synthesis, the cDNA preparations were pooled and stored at −20° C. upon the addition of the PCR master mix in the qPCR step.

qPCR on ViiA7

[0275] Amplification of cDNA was the second step in the two-step real-time (RT) qPCR experiment. The MFCs were run on 2 ViiA7 Dx systems from Applied Biosystems. The ViiA7 instruments were qualified according to internal procedures prior to use.

### MFC Cards and TaqMan Assays

[0276] The sample-specific PCR mix was loaded into a set of 3 MFC each comprising 384 different TaqMan assays. These assays comprised in-house assay as well as reference and known assays.

[0277] The cards were run sequentially during the primary run. For the re-run the samples were run sequentially with randomized order of cards. All 3 cards contained 7 reference assays, including beta-actin.

[0278] The TaqMan system detects PCR products using the 5′ nuclease activity of Taq DNA polymerase on fluorogenic DNA probes during each extension cycle. The Taqman probe (normally 25 mer) is labelled with a fluorescent reporter dye at the 5′-end and a fluorescent quencher dye at the 3′-end. When the probe is intact, the quencher dye reduces the emission intensity of the reporter dye. If the target sequence is present the probe anneals to the target and is cleaved by the 5′ nuclease activity of Taq DNA polymerase as the primer extension proceeds. As the cleavage of the probes separates the reporter dye from the quencher dye, the reporter dye fluorescence increases as a function of PCR cycle number. The greater the initial concentration of the target nucleic acid, the sooner a significant increase in fluorescence is observed.

[0279] Prepared cDNA was subjected to real-time PCR on the ViiA7 Dx systems with the following specifics for the present study:

Each aliquot (80 μl) of prepared cDNA reaction was used for preparation of the sample specific PCR reaction mixture to be loaded onto one MFC card. The cDNA was diluted 1/10 in the PCR reaction mixture according to Table 17. Each 8 lanes of one card were loaded with 97 μl PCR reaction mixture.

TABLE 17
Volume of components used to prepare
the PCR reaction mixture per MFC card

| Component | Volume (μl) |
|---|---|
| cDNA sample (8.5 ng RNA/μl) | 80 |
| RNAase/DNase-free water | 320 |
| TaqMan Universal PCR Master Mix II (2x) | 400 |
| Total | 800 |

### Reference Material

[0280] Reference samples were run throughout the experiment at regular time. These were used to monitor technical aspects such as inter-card and inter-day variability.

### Biological Modeling

### Classification and Merging

[0281] The classes and merged classes used for biological modeling are defined in Table 18 and Table 19, respectively.

TABLE 18
Classes

| Cohort | Class | Samples |
|---|---|---|
| Cognitively healthy | HC | 32 |
| MCI stable | S | 32 |
| MCI conversion | C | 34 |
| AD longitudinal (baseline)* | L1 | 31 |
| AD longitudinal (follow-up)* | L2 | 31 |

The 31 samples in L1 and L2 were from the same donor.

TABLE 19
Merged classes

| Name | Classes | Samples |
|---|---|---|
| MCI | C + S | 66 |
| Non-MCI | HC + L1/L2 | 63 |
| Non-AD | HC + S | 63 |
| AD | C + L2 | 61 |

### Statistical Modeling

[0282] The data generated from the ABI Viia7 instrument was preprocessed using a single reference assay, beta-actin. Assays from each card (containing 384 assays including different reference assays), 3 cards in total, were individually normalized with the beta-actin measurement within this card. In this analysis any missing values present were filled by the mean value of that particular assay. Excluding references, gene expression data from 1123 assays have been analyzed. The data were scaled during analysis. Partial Least Square Analysis was used for data modeling and variable selection was performed by Jackknifing. Performance results from all data are based on Leave-One-Out Cross-Validation approach (LOOCV) while the performance of models based on significant or informative assays were estimated by double Leave-One-Out Cross-Validation approach (dLOOCV) approach.

[0283] For the analysis the 5 outliers mentioned above were removed. The efficacy population thus comprises the following sample cohorts:

TABLE 20
Examined classes

| Cohort | Class | Samples |
|---|---|---|
| Cognitively healthy | HC | 32 |
| MCI stable | S | 31 |
| MCI conversion | C | 30 |
| AD longitudinal (baseline)* | L1 | 31 |
| AD longitudinal (follow-up)* | L2 | 31 |

*The 31 samples in L1 and L2 were from the same donor.

### 1. Blood Based Gene Expression Test to Detect Prodromal AD (or MCI Converters or Preclinical AD) in MCI Population

[0284] A PLSR model was built using all 1123 assay data derived from an effective population of 61 samples (31 stable MCI and 30 MCI converters). Performance of the model was determined by leave-one-out cross validation. 225 assays having a p-value of regression coefficient <0.2 were identified as significant or informative (listed in Table 2). The predictive ability of the identified probes was estimated by double leave-one-out cross validation.

[0285] In addition, a preselected set of 20 assays identified as informative in independent studies (Table 3) was tested for its ability to detect Prodromal AD in an MCI population. For this purpose a PLSR model was built using these assays and 61 samples (31 stable MCI and 30 MCI converters) and prediction performance determined by LOOCV. The performance results are summarized below.

| | | | | 20 |
|---|---|---|---|---|
| | | | | preselected |
| | | All | Table 2 | Table 3 |
| | | data | probes | probes |
| % of samples correctly | Accuracy | 74% | 77% | 77% |
| predicted | | | | |
| % of MCI converters | Sensitivity | 70% | 73% | 70% |
| correctly predicted | | | | |
| % of Stable MCI | Specificity | 77% | 81% | 84% |
| correctly predicted | | | | |

### Supporting External Data

[0286] A contract research organization performed an independent analysis to further support the internal findings based on data for 129 cases (Table 21) with a primary aim to identify a predictive signature to classify S vs. C.

TABLE 21
Classes with QC approved data

| Cohort | Class | Samples |
|---|---|---|
| Cognitively healthy | HC | 32 |
| MCI stable | S | 32 |
| MCI conversion | C | 34 |
| AD longitudinal (baseline) | L1 | 31 |

[0287] An artificial neural network was trained with an optimal number of assays and validated with monte-carlo cross validation re-sampling. In the cross validation procedure 80% of the samples were used for model training and 20% for model validation. Predictions were summarized and averaged per sample to produce an average predicted score and a standard deviation. The optimal number of assays to use in the network was determined by adding 1 by 1 assay until there was no improvement to accuracy of the classifier. This was all performed within each cross validation loop to prevent information leakage and bias to the performance. With a 10-gene panel (Table 4) the network was able to classify MCI converts from MCI stable with 88% accuracy. The population profile with MCI conversion prediction score for each individual case is shown in FIG. 1.

### 2. Blood Based Gene Expression Test to Detect Prodromal AD and Progressed AD in a Heterogeneous Population

| Cohort | Class | Samples |
|---|---|---|
| Non-AD | | |
| Cognitively healthy | HC | 32 |
| MCI stable | S | 31 |
| AD | | |
| MCI conversion | C | 30 |
| AD longitudinal (follow-up)* | L2 | 31 |
| | | 124 |

[0289] A PLSR model was built using all 1123 assay data derived from an effective population of 124 samples (32 cognitively healthy and 31 stable MCI grouped as Non-Alzheimer samples and 30 MCI converters and 31 progressed AD grouped as AD representing both preclinical and clinical Alzheimer samples) and performance determined by leave-one-out cross validation.

[0290] 302 assays listed in Table 5, having a p-value of regression coefficient <0.05 were identified as significant or informative. Their predictive ability was estimated by double leave-one-out cross validation.

[0291] Also, Table 3 probes were tested for their ability to detect Prodromal AD and progressed AD in a heterogeneous population. A PLSR model was built using these assays and prediction performance determined by LOOCV. The different prediction results are summarized below.

| | | All | Table 5 | Table 3 |
|---|---|---|---|---|
| | Performance | data | probes | probes |
| % of samples | Accuracy | 63% | 66% | 73% |
| correctly predicted | | | | |
| % of AD correctly | Sensitivity | 67% | 66% | 67% |
| predicted | | | | |
| % of NonAD correctly | Specificity | 60% | 67% | 79% |
| predicted | | | | |

3. Blood Based Gene Expression Test to Detect Patients with MCI in a Heterogeneous Population

| Cohort | Class | Samples |
|---|---|---|
| MCI | | |
| MCI stable | S | 31 |
| MCI conversion | C | 30 |
| Non-MCI | | |
| Cognitively healthy | HC | 32 |
| AD longitudinal (follow-up)* | L2 | 31 |
| | | 124 |

[0292] A PLSR model was built using all 1123 assay data derived from an effective population of 124 samples (and 31 stable MCI grouped and 30 MCI converters grouped as MCI samples and 32 cognitively healthy 31 progressed AD grouped as Non-MCI samples) and performance determined by leave-one-out cross validation.

[0293] 266 assays listed in Table 6, having a p-value of regression coefficient <0.2 were identified as significant or informative and predictive ability estimated by double LOOCV. The prediction results are shown below:

| | | All | Table 6 |
|---|---|---|---|
| | Performance | data | probes |
| % of samples correctly | Accuracy | 71% | 75% |
| predicted | | | |
| % of NonMCI correctly | Sensitivity | 67% | 77% |
| predicted | | | |
| % of MCI correctly | Specificity | 75% | 73% |
| predicted | | | |

### 4. Blood Based Gene Expression Test to Discriminate Between Different Stages of Alzheimer's Disease

### A. Test to Discriminate Prodromal AD and Progressed AD

| Cohort | Class | Samples |
|---|---|---|
| MCI conversion | Prodromal AD | 30 |
| AD longitudinal follow-up | Progressed AD | 31 |
| | | 61 |

[0295] A PLSR model was built using all 1123 assay data derived from 61 samples comprising 30 prodromal and 31 progressed samples. Converters and progressed AD will be 2 extremes for AD, and assays able to discriminate them could be used to discriminate between different stages of Alzheimer's disease. The built in model was validated by LOOCV and prediction performance determined.

[0296] Following Jackknifing, 144 assays, listed in Table 7, having a p-value of regression coefficient <0.05 were identified as significant or informative and their predictive ability was determined by double leave-one-out cross validation. The performance results are summarized below:

| | | All | Table 7 |
|---|---|---|---|
| | Performance | data | probes |
| % of samples correctly | Accuracy | 79% | 80% |
| predicted | | | |
| % of Progressed AD | Sensitivity | 80% | 81% |
| % of Prodromal AD | Specificity | 77% | 80% |
| correctly predicted | | | |

### B. Test to Discriminate Very Mild and Mild Dementia

[0297] Clinical samples were grouped as very mild or mild based on their Clinical dementia rating. CDR rating can be used to determine functional cognitive decline in patients with dementia.

| Cohort | Class | Samples |
|---|---|---|
| Samples with CDR 0.5 | Very Mild | 78 |
| Samples with CDR 1.0 | Mild | 32 |
| | | 110 |

[0298] A validated PLSR model was built in using all 1123 assay and 110 samples (comprising of 73 very mild and 31 mild dementia cases). Jackknifing identified 82 significant and/or informative probes, listed in Table 8. Their predictive ability was determined by double leave-one-out cross validation. The performance results are summarized below:

| | | All | Table 8 |
|---|---|---|---|
| | Performance | data | probes |
| % of samples correctly | Accuracy | 77% | 75% |
| predicted | | | |
| % of correctly | Sensitivity | 77% | 75% |
| predicted Mild AD | | | |
| % of correctly | Specificity | 77% | 74% |
| predicted Very Mild AD | | | |

### 5. Blood Based Gene Expression Test to Predict the Rate of Disease Progression in Alzheimer's Patients.

[0299] Gene expression signatures to determine the rate of disease progression in AD patients were developed using two different approaches.

[0300] The first investigated the retrospective determination of AD progression using 2 different models. The first model used the difference in gene expression for AD patients at baseline and at a follow-up visit to discriminate between donors with and without clear progression (Intra-person). The second model subsequently used the probes listed in Tables 7 and 11 for modeling of changes in gene expression profile from baseline to follow-up visits for donors with clear progression (Inter-person).

[0301] The second approach was a prospective approach aiming at predicting the future rate of disease progression of AD patients using the gene expression data from patients at baseline visit to discriminate between donors with and without clear progression.

[0302] Based on global CDR and CDR-Sum of boxes values obtained during the first (baseline) and second follow-up visits the donors were divided into 2 groups. Of the 31 donors, 16 had clear disease progression, 12 had no clear progression. In total 4 donors were removed where one was a technical outlier and for 3 no CDR and CDR-SOB were available The 27 donors were used for further analysis, see below.

| | | Global CDR | | MMSE | |
|---|---|---|---|---|---|
| | | Mean | Mean | Mean | Mean |
| | Do- | baseline | follow-up | baseline | follow-up |
| Cohort | nors | (min-max) | (min-max) | (min-max) | (min-max) |
| Clear | 15 | 0.9 (0.0-1.0) | 1.4 (1.0-2.0) | 25 (16-19) | 21 (12-29) |
| progression | | | | | |
| No clear | 12 | 1.1 (0.0-2.0) | 1.0 (1.0-1.0) | 24 (19-29) | 21 (10-25) |
| progression | | | | | |
| Total | 27 | 1.0 (0.0-2.0) | 1.3 (1.0-2.0) | 24 (16-19) | 21 (10-29) |

### Retrospective Approach

[0303] Intra-Person: Change in Gene Expression from Baseline to Follow-Up

[0304] The gene expression values for each assay at baseline were subtracted from the values for corresponding assay at follow-up. The data matrix obtained was then modeled by PLSR to discriminate patients with clear and non-clear disease progression. The model identified 78 informative probes with p value of regression coefficients <0.05 listed in Table 10. The performance results are summarized below.

| | | All | Probes listed |
|---|---|---|---|
| | Performance | data | in Table 7 |
| % of correctly | Accuracy | 78% | 67% |
| predicted samples | | | |
| % of correctly | Sensitivity | 87% | 73% |
| predicted samples with | | | |
| clear progression | | | |
| % of correctly | Specificity | 67% | 58% |
| predicted samples with | | | |
| no clear progression | | | |

[0305] Inter-Person: Discrimination at Baseline and Follow-Up Stages of the Patients with Clear Disease Progression

[0306] For this model, 15 donors with clear progression were modelled by PLSR to discriminate between samples at baseline and follow-up. The performance results including those obtained for identified informative assays (Table 11) and assays listed in Table 7 are presented below.

| | | All | Table 11 | Table 7 |
|---|---|---|---|---|
| | Performance | data | probes | probe set |
| % of correctly | Accuracy | 75% | 94% | 81% |
| predicted samples | | | | |
| % of correctly | Sensitivity | 81% | 94% | 88% |
| predicted samples at | | | | |
| follow-up | | | | |
| % of correctly | Specificity | 69% | 94% | 75% |
| predicted samples at | | | | |
| baseline | | | | |

### Prospective Modeling

[0307] To investigate the ability to predict future rate of progression of an AD patient, a model was developed using the gene expression data from baseline samples only. Informative probes were identified and validated by double LOOCV (listed in Table 9). The predictions and performance results are summarized below.

| | | All | Table 9 | Table 7 |
|---|---|---|---|---|
| | Performance | data | probes | probe set |
| % of correctly | Accuracy | 67% | 73% | 67% |
| predicted samples | | | | |
| % of correctly | Sensitivity | 73% | 73% | 67% |
| predicted samples with | | | | |
| clear progression | | | | |
| % of correctly | Specificity | 58% | 73% | 67% |
| predicted samples with | | | | |
| no clear progression | | | | |

[0308] The results clearly show that blood based gene expression test has the ability to identify patients where disease will progress more rapidly.

### Minimum Probe Sets Analysis

[0309] The results above show the generation of data using the sets of probes presented in the various tables. However, selection of 10 or more of those probes also yields useful results. FIGS. 2 to 9 show the results of Permutation plots for the probes reported in the different tables. From the probes listed in the respective tables a set of probes (X axis gives the number of probes) were randomly selected and used to model the relevant classes. The process was iterated several hundred times (to be more specific 5204 iterations in total for Table 2, 11718 iterations in total for Table 6, 10054 iterations for Table 5, 39970 iterations for Table 7, 161636 for Table 10, 29582 iteration for Table 9, 211426 iteration for Table 11, 57802 iteration in total for Table 8). Performance was estimated by calculating Area Under Curve (AUC) which is sensitivity/1-specificity.

### DISCUSSION

[0310] The ability to predict whether an MCI patient will remain stable or convert to AD within the next few years is of great value and, hence, the highest expectations were associated with the classification of stable MCI and MCI converters. The use of stable MCI for the classification is highly medical relevant considering the patients presenting with subjective memory complaints may more likely be considered a case of stable MCI than a cognitively healthy subject if they are not converting to AD.

[0311] The present example demonstrates that these indeed may be discriminated. Both internal results, as well as supporting external data, using an alternative approach to data processing and model building, demonstrates the classification of stable MCI and MCI converters. Typically an accuracy of 77% was obtained for internal results, with external accuracy data of 88%.

[0312] The DiaGenic's ADtect test is a gene expression test for the diagnosis of AD. The prediction is merely a positive or a negative diagnosis, without any staging of a positive AD diagnosis. Both the ability to document a progression in AD diagnosis as well as the ability to stage the AD diagnosis are of clinical relevance.

[0313] In the present example, a gene expression signature to determine the progression of AD was developed. Two different approaches were investigated. The first approach investigated the retrospective determination of AD progression using 2 different models. The first model investigated the difference in gene expression for AD patients at baseline and at a follow-up visit to discriminate between donors with and without progression. The second model subsequently used the informative subset for modeling of changes in gene expression profile from baseline to follow-up visit for donors with and without progression, respectively. Using this model subjects with clear progression were correctly predicted in over 94% of cases, demonstrating the potential for the gene signature as an AD progression marker. The second approach was a prospective approach aiming at predicting the future progression of AD patients. For the investigated model an accuracy of 73% was obtained.

[0314] Additional modelling for diagnosing and/or staging AD, diagnosing MCI and determining the severity of dementia is also reported.

TABLE 1
Summary of informative probes. Frequency of occurrence in sets. (− = absent, + =
present) The Assay numbers refer to specific sequences for which details are provided after the tables.

| Sequence Number | Table 2 | Table 3 | Table 4 | Table 5 | Table 6 | Table 7 | Table 8 | Table 9 | Table 10 | Table 11 |
|---|---|---|---|---|---|---|---|---|---|---|
| ASSAY0001 | − | − | − | + | − | − | − | + | − | − |
| ASSAY0002 | − | − | − | + | − | − | − | + | + | − |
| ASSAY0003 | − | − | − | + | − | − | − | + | − | − |
| ASSAY0006 | + | − | − | + | − | − | − | + | + | − |
| ASSAY0007 | − | − | − | − | − | − | − | − | + | − |
| ASSAY0010 | − | − | − | + | − | − | − | − | − | − |
| ASSAY0011 | − | − | − | + | + | + | + | − | − | − |
| ASSAY0012 | + | − | − | − | + | + | − | − | − | − |
| ASSAY0013 | − | − | − | + | − | − | − | + | + | − |
| ASSAY0014 | − | − | − | − | + | − | − | − | − | − |
| ASSAY0015 | + | − | − | − | − | − | − | − | + | − |
| ASSAY0017 | + | − | − | + | − | − | − | + | − | − |
| ASSAY0018 | − | − | − | − | − | − | − | + | − | − |
| ASSAY0020 | − | − | − | − | + | − | − | − | − | − |
| ASSAY0022 | − | − | − | − | + | + | + | + | − | − |
| ASSAY0024 | − | − | − | − | − | − | − | + | − | + |
| ASSAY0027 | + | − | − | + | − | − | − | + | − | − |
| ASSAY0031 | − | − | − | − | − | − | − | + | − | − |
| ASSAY0032 | + | − | − | − | + | − | − | − | − | − |
| ASSAY0036 | − | − | − | − | − | − | − | + | − | − |
| ASSAY0037 | + | − | − | − | − | − | − | − | − | + |
| ASSAY0038 | − | − | − | − | − | + | − | − | − | + |
| ASSAY0039 | − | − | − | − | − | − | − | − | − | + |
| ASSAY0040 | + | − | − | + | − | − | − | + | − | − |
| ASSAY0041 | − | − | − | − | − | + | − | + | − | − |
| ASSAY0044 | + | − | − | + | − | − | − | − | − | − |
| ASSAY0045 | − | − | − | + | − | − | − | − | − | − |
| ASSAY0046 | + | − | − | + | − | − | − | − | − | − |
| ASSAY0047 | − | − | − | + | + | − | + | + | − | − |
| ASSAY0048 | − | − | − | + | − | − | − | − | − | − |
| ASSAY0049 | − | − | − | − | − | − | − | + | − | − |
| ASSAY0050 | − | − | − | − | − | − | − | + | − | − |
| ASSAY0051 | − | − | − | − | + | − | + | − | − | − |
| ASSAY0052 | − | − | − | − | − | + | + | − | − | + |
| ASSAY0053 | + | − | − | − | − | − | − | + | + | − |
| ASSAY0054 | − | − | − | − | + | − | − | + | − | − |
| ASSAY0055 | − | − | − | − | − | − | − | + | − | − |
| ASSAY0056 | − | − | − | + | − | − | − | − | − | − |
| ASSAY0057 | − | − | − | − | + | + | + | + | − | − |
| ASSAY0060 | − | − | − | + | − | − | − | − | − | − |
| ASSAY0061 | − | − | − | − | − | − | − | + | − | − |
| ASSAY0062 | − | − | − | + | − | − | + | − | − | − |
| ASSAY0063 | + | − | − | + | − | − | − | − | − | − |
| ASSAY0065 | + | − | − | + | − | − | − | + | − | − |
| ASSAY0066 | − | − | − | − | − | − | − | − | − | + |
| ASSAY0067 | − | − | − | + | − | − | − | − | − | − |
| ASSAY0069 | + | − | − | − | − | − | − | − | − | − |
| ASSAY0070 | − | − | − | − | + | − | − | + | − | + |
| ASSAY0072 | − | − | − | − | + | − | − | − | − | − |
| ASSAY0074 | − | − | − | + | − | − | − | − | − | − |
| ASSAY0077 | − | − | − | − | − | − | − | − | + | + |
| ASSAY0080 | − | − | − | − | − | − | − | + | − | − |
| ASSAY0081 | − | − | − | − | − | − | − | − | + | − |
| ASSAY0082 | − | − | − | − | + | + | + | − | − | − |
| ASSAY0084 | + | − | − | + | − | − | − | − | − | − |
| ASSAY0085 | + | − | − | + | − | − | − | + | − | − |
| ASSAY0086 | − | − | − | + | − | − | − | − | − | − |
| ASSAY0087 | + | − | − | − | − | − | − | − | − | − |
| ASSAY0088 | + | − | − | − | − | − | − | − | − | − |
| ASSAY0089 | − | − | − | + | + | − | − | + | − | − |
| ASSAY0092 | − | − | − | + | − | − | − | − | − | − |
| ASSAY0093 | + | − | − | − | + | + | − | + | − | − |
| ASSAY0096 | − | − | − | − | + | + | − | + | − | − |
| ASSAY0097 | − | − | − | − | − | − | − | + | − | − |
| ASSAY0098 | − | − | − | + | − | − | − | + | + | + |
| ASSAY0099 | − | − | − | − | − | + | − | − | − | + |
| ASSAY0103 | + | − | − | + | − | − | − | − | − | − |
| ASSAY0104 | − | − | − | − | − | − | − | − | − | + |
| ASSAY0107 | − | − | − | + | − | − | − | − | − | − |
| ASSAY0108 | − | − | − | − | − | − | − | + | − | − |
| ASSAY0110 | − | − | − | − | + | − | − | − | − | − |
| ASSAY0112 | + | − | − | + | − | − | − | + | − | − |
| ASSAY0113 | − | − | − | − | + | + | + | − | − | − |
| ASSAY0114 | − | − | − | + | + | + | − | − | − | − |
| ASSAY0115 | − | − | − | − | − | − | − | + | − | − |
| ASSAY0116 | + | − | − | − | − | − | − | − | − | − |
| ASSAY0117 | + | − | − | + | − | − | − | − | − | − |
| ASSAY0118 | − | − | − | − | − | − | − | − | + | − |
| ASSAY0119 | − | − | − | + | − | − | − | + | + | − |
| ASSAY0120 | + | − | − | + | − | − | − | + | − | − |
| ASSAY0122 | + | − | − | − | − | + | − | − | − | − |
| ASSAY0123 | − | − | − | − | + | − | − | − | − | − |
| ASSAY0124 | − | − | − | + | − | − | − | − | − | − |
| ASSAY0126 | + | − | − | + | + | − | − | − | − | + |
| ASSAY0127 | − | − | − | − | − | − | − | + | − | − |
| ASSAY0128 | + | − | − | + | + | + | − | − | − | − |
| ASSAY0129 | − | − | − | + | − | − | − | − | − | − |
| ASSAY0132 | − | − | − | − | + | − | − | + | − | − |
| ASSAY0133 | − | − | − | − | − | − | − | + | + | − |
| ASSAY0135 | − | − | − | − | + | + | − | − | − | − |
| ASSAY0136 | − | − | − | + | − | − | − | + | − | − |
| ASSAY0137 | − | − | − | − | + | − | + | + | − | − |
| ASSAY0138 | + | − | − | − | − | − | − | − | − | − |
| ASSAY0139 | − | − | − | − | + | − | − | − | − | − |
| ASSAY0140 | − | − | − | − | + | + | − | − | − | + |
| ASSAY0141 | + | − | + | + | − | − | − | − | − | − |
| ASSAY0142 | − | − | − | + | − | − | − | − | − | − |
| ASSAY0144 | − | − | − | − | + | − | − | − | − | − |
| ASSAY0145 | − | − | − | − | − | − | − | + | − | − |
| ASSAY0147 | + | − | − | + | − | − | − | − | − | − |
| ASSAY0148 | − | − | − | − | + | + | − | − | − | − |
| ASSAY0149 | − | − | − | + | − | − | − | − | − | − |
| ASSAY0150 | + | − | − | + | − | − | + | + | − | − |
| ASSAY0151 | − | − | − | + | − | − | − | − | − | − |
| ASSAY0152 | − | − | − | + | − | − | − | − | − | − |
| ASSAY0153 | + | − | − | − | − | − | − | − | − | − |
| ASSAY0154 | − | − | − | + | − | − | − | + | − | − |
| ASSAY0155 | − | − | − | + | − | − | − | − | − | − |
| ASSAY0156 | + | − | − | + | − | − | − | + | − | − |
| ASSAY0157 | + | − | − | − | − | − | − | + | − | − |
| ASSAY0158 | + | − | − | + | − | − | − | + | − | − |
| ASSAY0159 | − | − | − | − | − | − | − | − | − | + |
| ASSAY0160 | + | − | − | + | − | − | − | − | − | − |
| ASSAY0161 | − | − | − | − | + | − | − | − | − | − |
| ASSAY0162 | − | − | − | − | − | − | − | + | + | + |
| ASSAY0163 | − | − | − | − | + | − | − | + | − | − |
| ASSAY0164 | − | − | − | + | − | − | − | − | − | + |
| ASSAY0165 | + | − | − | + | − | − | − | − | − | + |
| ASSAY0166 | − | − | − | − | − | − | − | + | − | − |
| ASSAY0168 | − | − | − | + | − | − | − | − | − | − |
| ASSAY0169 | − | − | − | − | − | − | − | + | − | − |
| ASSAY0170 | − | − | − | − | − | − | − | + | − | − |
| ASSAY0171 | − | − | − | + | − | − | − | − | − | − |
| ASSAY0172 | − | − | − | − | − | − | + | − | + | − |
| ASSAY0174 | − | − | − | + | − | − | − | − | − | + |
| ASSAY0176 | − | − | − | + | − | − | − | − | − | + |
| ASSAY0178 | + | − | − | + | + | − | − | − | − | − |
| ASSAY0179 | − | − | − | − | + | − | − | − | − | − |
| ASSAY0180 | − | − | − | + | − | − | − | + | − | − |
| ASSAY0181 | − | − | − | − | + | + | − | − | − | − |
| ASSAY0182 | − | − | − | − | + | − | − | + | − | − |
| ASSAY0183 | + | − | − | + | − | − | − | + | − | − |
| ASSAY0184 | − | − | − | − | + | + | − | − | − | − |
| ASSAY0185 | − | − | − | − | − | − | + | − | − | − |
| ASSAY0186 | − | − | − | − | − | − | − | − | + | − |
| ASSAY0187 | − | − | − | − | − | − | + | − | − | − |
| ASSAY0189 | − | − | − | − | − | + | − | − | − | − |
| ASSAY0190 | − | − | − | − | + | − | − | + | − | − |
| ASSAY0191 | − | + | − | − | − | − | − | + | − | − |
| ASSAY0193 | − | − | − | − | + | − | − | − | − | − |
| ASSAY0194 | − | + | − | + | − | − | − | + | − | − |
| ASSAY0195 | + | − | − | − | − | − | − | − | − | − |
| ASSAY0196 | − | + | − | − | − | − | − | − | − | − |
| ASSAY0197 | − | + | − | + | − | − | − | + | − | − |
| ASSAY0198 | + | − | − | + | − | − | − | − | − | − |
| ASSAY0199 | − | − | − | + | − | − | − | + | − | − |
| ASSAY0200 | − | − | − | + | − | − | − | − | − | − |
| ASSAY0202 | − | + | − | + | + | − | − | − | − | − |
| ASSAY0203 | − | − | − | − | + | − | − | + | − | − |
| ASSAY0204 | − | − | − | + | − | − | − | + | − | − |
| ASSAY0205 | − | − | − | − | − | − | + | − | − | − |
| ASSAY0206 | − | − | − | − | + | − | − | − | − | − |
| ASSAY0207 | + | + | − | − | + | + | − | − | − | − |
| ASSAY0209 | − | − | − | + | + | + | + | − | − | − |
| ASSAY0210 | − | − | − | + | − | + | − | + | − | + |
| ASSAY0211 | + | − | − | − | + | − | − | − | − | − |
| ASSAY0212 | − | − | − | − | + | − | + | − | − | − |
| ASSAY0213 | − | − | − | − | − | − | − | + | − | − |
| ASSAY0214 | − | − | − | − | − | − | − | + | − | − |
| ASSAY0215 | − | + | − | + | − | − | − | + | − | − |
| ASSAY0216 | − | − | − | − | + | + | − | − | − | − |
| ASSAY0217 | − | − | − | − | + | − | − | − | − | − |
| ASSAY0218 | − | − | − | − | − | − | − | + | − | − |
| ASSAY0221 | + | + | − | + | − | − | − | − | − | − |
| ASSAY0222 | + | + | − | + | − | − | − | − | − | − |
| ASSAY0223 | − | − | − | − | + | + | − | + | + | − |
| ASSAY0224 | − | − | − | − | − | − | + | − | − | − |
| ASSAY0225 | − | − | − | − | − | − | − | − | + | + |
| ASSAY0226 | + | + | − | + | − | − | − | − | − | − |
| ASSAY0227 | − | − | − | − | + | − | − | + | − | − |
| ASSAY0228 | − | + | − | − | + | − | − | + | − | − |
| ASSAY0230 | − | − | − | + | + | + | − | − | − | + |
| ASSAY0232 | + | − | − | − | − | − | − | + | − | − |
| ASSAY0234 | + | − | − | − | − | + | − | − | − | − |
| ASSAY0236 | − | + | − | − | + | − | − | − | − | − |
| ASSAY0242 | − | − | − | − | + | + | − | + | + | + |
| ASSAY0243 | − | + | − | − | − | − | − | − | − | − |
| ASSAY0244 | − | − | − | − | + | − | − | − | − | − |
| ASSAY0245 | + | − | − | − | − | − | − | − | + | + |
| ASSAY0246 | + | + | − | + | − | − | − | + | − | − |
| ASSAY0247 | − | − | − | + | − | − | − | − | − | − |
| ASSAY0249 | − | − | − | − | − | − | − | + | − | − |
| ASSAY0250 | − | − | − | − | − | − | − | + | − | − |
| ASSAY0251 | + | + | − | + | − | − | − | + | − | − |
| ASSAY0252 | + | − | − | − | − | − | − | − | − | − |
| ASSAY0253 | − | − | − | − | + | − | − | − | − | − |
| ASSAY0254 | − | − | − | − | − | − | − | + | + | − |
| ASSAY0255 | − | − | − | − | + | − | − | − | − | − |
| ASSAY0256 | − | + | − | − | − | − | − | − | − | + |
| ASSAY0257 | − | − | − | + | + | − | − | − | − | + |
| ASSAY0258 | − | − | − | + | − | − | − | − | − | + |
| ASSAY0259 | + | − | − | − | − | − | − | − | − | − |
| ASSAY0261 | − | − | − | − | + | − | + | − | − | − |
| ASSAY0262 | − | + | − | − | − | − | − | − | − | − |
| ASSAY0263 | − | − | − | − | + | + | − | − | − | + |
| ASSAY0264 | − | − | − | − | + | − | − | − | − | − |
| ASSAY0265 | + | − | − | + | − | − | − | − | − | − |
| ASSAY0266 | − | − | − | − | + | + | − | − | − | − |
| ASSAY0267 | − | − | − | + | + | − | − | + | − | − |
| ASSAY0268 | − | − | − | + | − | − | − | − | − | + |
| ASSAY0269 | − | − | − | + | − | − | − | − | − | + |
| ASSAY0270 | − | − | − | + | − | − | − | + | − | − |
| ASSAY0272 | − | − | − | − | − | − | − | + | − | − |
| ASSAY0273 | + | − | − | − | − | − | − | − | − | − |
| ASSAY0274 | − | − | − | − | − | − | − | − | − | + |
| ASSAY0275 | − | + | − | − | − | − | − | − | − | − |
| ASSAY0277 | − | + | − | − | − | − | − | − | − | − |
| ASSAY0278 | + | + | − | + | + | − | − | − | − | − |
| ASSAY0279 | − | − | − | − | − | − | + | − | − | − |
| ASSAY0280 | − | − | − | + | − | − | − | − | − | − |
| ASSAY0281 | − | − | − | − | − | + | − | + | − | − |
| ASSAY0282 | − | − | − | − | + | + | − | − | − | − |
| ASSAY0284 | − | − | − | + | + | − | − | − | − | − |
| ASSAY0285 | − | − | − | − | + | − | + | + | − | − |
| ASSAY0286 | − | − | − | − | + | − | − | + | − | − |
| ASSAY0289 | + | − | − | + | − | − | + | − | − | − |
| ASSAY0290 | − | − | − | + | + | − | − | − | − | − |
| ASSAY0291 | − | − | − | − | − | + | − | + | − | − |
| ASSAY0292 | − | − | − | + | − | − | − | − | + | + |
| ASSAY0293 | − | − | − | + | − | − | − | − | − | + |
| ASSAY0294 | − | − | − | − | − | − | − | + | − | − |
| ASSAY0296 | − | − | − | − | − | − | − | + | − | − |
| ASSAY0299 | − | − | − | − | + | − | − | − | + | + |
| ASSAY0302 | + | − | − | + | − | − | − | + | − | − |
| ASSAY0304 | − | − | − | − | + | + | + | − | − | − |
| ASSAY0306 | − | − | − | − | + | + | + | − | − | − |
| ASSAY0307 | + | − | − | − | − | − | + | − | − | − |
| ASSAY0309 | − | − | − | − | − | − | − | + | − | − |
| ASSAY0313 | − | − | − | − | + | − | − | + | − | − |
| ASSAY0315 | + | − | − | + | − | − | − | − | − | − |
| ASSAY0316 | + | − | − | − | − | − | − | − | − | − |
| ASSAY0317 | − | − | − | − | + | − | − | − | − | − |
| ASSAY0319 | − | − | − | + | − | − | − | + | − | − |
| ASSAY0320 | − | − | − | + | − | − | − | − | − | − |
| ASSAY0321 | + | − | − | + | − | − | − | − | − | − |
| ASSAY0322 | − | − | − | − | + | − | − | − | − | − |
| ASSAY0324 | − | − | − | − | − | + | − | − | − | − |
| ASSAY0327 | − | − | − | − | − | − | + | − | − | − |
| ASSAY0329 | − | − | − | − | + | − | − | − | − | − |
| ASSAY0331 | − | − | − | + | − | − | − | − | − | − |
| ASSAY0332 | − | − | − | − | + | + | − | + | − | − |
| ASSAY0334 | + | − | − | − | − | − | − | − | + | − |
| ASSAY0335 | + | − | − | + | + | − | − | − | − | − |
| ASSAY0336 | − | − | − | + | − | − | − | − | − | − |
| ASSAY0337 | − | − | − | + | − | − | − | − | + | + |
| ASSAY0338 | + | − | − | − | − | − | − | + | − | − |
| ASSAY0339 | + | − | − | − | − | − | − | + | − | − |
| ASSAY0340 | + | − | − | + | − | − | − | − | − | + |
| ASSAY0341 | − | − | − | + | − | − | − | − | − | − |
| ASSAY0342 | − | − | − | + | − | − | − | − | − | − |
| ASSAY0343 | − | − | − | − | + | − | − | + | − | − |
| ASSAY0344 | − | − | − | + | − | − | − | − | + | + |
| ASSAY0345 | − | − | − | + | − | − | − | − | − | − |
| ASSAY0346 | − | − | − | − | + | + | + | − | − | − |
| ASSAY0347 | + | − | − | − | − | − | − | − | − | − |
| ASSAY0348 | − | − | − | + | + | + | − | − | − | − |
| ASSAY0351 | − | − | − | + | − | − | − | − | − | − |
| ASSAY0352 | − | − | − | − | + | − | − | − | − | + |
| ASSAY0354 | − | − | − | + | − | − | − | − | − | − |
| ASSAY0355 | − | − | − | + | − | − | − | + | − | − |
| ASSAY0356 | − | − | − | + | + | + | − | − | − | − |
| ASSAY0357 | − | − | − | + | − | − | − | − | − | − |
| ASSAY0358 | − | − | − | − | − | − | − | + | − | − |
| ASSAY0359 | − | − | − | − | + | + | − | − | + | + |
| ASSAY0361 | − | − | − | − | − | − | − | + | + | − |
| ASSAY0362 | − | − | − | + | − | − | − | − | − | − |
| ASSAY0364 | − | − | − | − | − | − | − | + | − | − |
| ASSAY0366 | − | − | − | − | + | − | − | − | + | − |
| ASSAY0367 | − | − | − | + | − | − | − | − | − | + |
| ASSAY0368 | + | − | − | − | − | − | − | − | − | − |
| ASSAY0369 | − | − | − | − | − | − | − | + | + | + |
| ASSAY0370 | − | − | − | − | + | + | − | − | − | + |
| ASSAY0371 | − | − | − | − | − | − | − | − | − | + |
| ASSAY0372 | − | − | − | − | + | + | + | − | − | + |
| ASSAY0373 | − | − | − | − | − | + | − | − | − | − |
| ASSAY0374 | + | − | − | + | − | − | − | + | − | − |
| ASSAY0376 | − | − | − | − | − | − | − | + | + | + |
| ASSAY0378 | − | − | − | − | + | − | − | − | − | − |
| ASSAY0379 | + | − | − | − | − | − | − | − | − | − |
| ASSAY0380 | + | − | − | + | − | − | − | + | − | − |
| ASSAY0381 | − | − | − | − | − | − | − | + | + | − |
| ASSAY0382 | + | − | − | − | + | + | − | − | − | − |
| ASSAY0386 | + | − | − | − | − | − | − | − | − | − |
| ASSAY0387 | − | − | − | − | − | − | − | + | − | − |
| ASSAY0388 | − | − | − | − | − | − | − | − | − | + |
| ASSAY0391 | + | − | − | + | − | − | − | − | − | − |
| ASSAY0392 | − | − | − | + | − | + | − | − | − | − |
| ASSAY0393 | − | − | − | + | + | − | − | + | − | − |
| ASSAY0394 | − | − | − | + | − | − | − | + | − | − |
| ASSAY0397 | + | − | − | − | − | − | − | − | − | − |
| ASSAY0399 | − | − | − | − | − | − | + | − | − | − |
| ASSAY0400 | + | − | − | + | − | − | − | + | − | − |
| ASSAY0401 | − | − | − | − | − | − | − | + | + | + |
| ASSAY0402 | − | − | − | + | + | + | − | + | − | − |
| ASSAY0403 | − | − | − | − | − | − | − | − | − | + |
| ASSAY0405 | + | − | − | + | − | + | − | − | − | − |
| ASSAY0407 | − | − | − | + | + | + | − | + | − | + |
| ASSAY0408 | − | − | − | + | + | − | − | − | − | − |
| ASSAY0409 | − | − | − | + | − | − | − | − | − | − |
| ASSAY0410 | − | − | − | − | + | − | − | − | − | − |
| ASSAY0412 | + | − | − | − | − | − | − | − | − | − |
| ASSAY0414 | + | − | − | − | − | − | − | − | − | − |
| ASSAY0415 | − | − | − | − | − | − | − | + | − | − |
| ASSAY0417 | − | − | − | − | − | + | − | − | − | − |
| ASSAY0420 | − | − | − | + | − | − | − | − | − | − |
| ASSAY0421 | + | − | − | + | + | − | − | + | + | + |
| ASSAY0422 | − | − | − | − | − | − | + | − | − | − |
| ASSAY0423 | − | − | − | − | − | − | − | + | + | − |
| ASSAY0424 | + | − | − | − | − | − | − | − | − | − |
| ASSAY0425 | − | − | − | + | + | − | − | + | + | + |
| ASSAY0426 | + | − | − | − | − | − | − | − | − | − |
| ASSAY0427 | − | − | − | + | − | − | − | − | − | − |
| ASSAY0428 | − | − | − | − | − | − | + | − | − | − |
| ASSAY0429 | − | − | − | − | + | − | − | − | + | + |
| ASSAY0431 | + | − | − | + | − | − | − | − | − | − |
| ASSAY0432 | − | − | − | − | + | + | − | + | − | − |
| ASSAY0433 | − | − | − | + | − | − | − | + | − | − |
| ASSAY0434 | − | − | − | − | − | − | − | + | − | + |
| ASSAY0435 | − | − | − | + | − | − | − | − | − | − |
| ASSAY0436 | + | − | − | − | − | − | − | − | − | − |
| ASSAY0437 | − | − | − | + | − | − | − | + | + | − |
| ASSAY0440 | − | − | − | + | + | − | − | − | − | − |
| ASSAY0441 | + | − | − | + | − | − | − | − | − | − |
| ASSAY0442 | − | − | − | + | − | − | − | − | − | − |
| ASSAY0443 | − | − | − | − | + | − | − | − | − | − |
| ASSAY0445 | + | − | − | − | + | − | − | − | − | − |
| ASSAY0446 | + | − | − | − | − | − | − | − | − | − |
| ASSAY0449 | − | − | − | + | − | − | − | − | − | − |
| ASSAY0450 | − | − | − | + | + | + | − | + | − | − |
| ASSAY0451 | − | − | − | − | + | + | − | − | − | + |
| ASSAY0452 | − | − | − | − | − | − | − | − | + | + |
| ASSAY0453 | − | − | − | − | + | + | − | − | − | − |
| ASSAY0455 | − | − | − | − | + | + | − | − | − | − |
| ASSAY0456 | − | − | − | + | + | + | + | − | − | + |
| ASSAY0457 | − | − | − | − | − | − | − | − | − | + |
| ASSAY0458 | − | − | − | − | + | − | + | − | − | − |
| ASSAY0459 | − | − | − | − | + | − | − | − | − | − |
| ASSAY0460 | + | − | + | + | + | − | − | − | − | − |
| ASSAY0461 | + | − | − | − | − | − | − | − | − | − |
| ASSAY0463 | − | − | − | + | − | − | + | + | + | + |
| ASSAY0464 | − | − | − | − | + | + | − | − | − | + |
| ASSAY0465 | − | − | − | − | − | − | − | + | + | − |
| ASSAY0467 | − | − | − | − | + | + | + | − | − | − |
| ASSAY0472 | + | − | − | + | − | − | − | − | − | − |
| ASSAY0473 | − | − | − | − | − | − | − | + | − | − |
| ASSAY0474 | + | − | − | − | + | − | − | − | − | − |
| ASSAY0476 | + | − | − | − | − | + | − | − | − | − |
| ASSAY0477 | − | − | − | − | + | + | − | − | − | − |
| ASSAY0478 | − | − | − | − | + | + | − | + | − | − |
| ASSAY0479 | + | − | − | − | + | − | − | − | − | − |
| ASSAY0480 | − | − | − | + | + | + | − | − | − | − |
| ASSAY0481 | − | − | − | − | + | − | + | − | − | − |
| ASSAY0482 | − | − | − | − | + | + | − | − | − | + |
| ASSAY0483 | + | − | − | − | + | − | − | − | − | − |
| ASSAY0484 | + | − | − | + | + | + | − | + | − | − |
| ASSAY0485 | + | − | − | − | − | − | − | + | − | − |
| ASSAY0486 | − | − | − | − | + | − | − | − | − | + |
| ASSAY0487 | − | − | − | − | − | + | − | − | − | − |
| ASSAY0488 | − | − | − | − | − | + | − | − | − | − |
| ASSAY0489 | − | − | − | + | − | − | + | + | − | − |
| ASSAY0491 | + | − | − | − | − | + | − | − | − | − |
| ASSAY0494 | − | − | − | − | − | − | − | + | − | + |
| ASSAY0495 | − | − | − | − | − | − | − | + | − | − |
| ASSAY0497 | − | − | − | − | − | − | − | + | − | − |
| ASSAY0499 | − | − | − | − | − | − | − | + | − | + |
| ASSAY0500 | + | − | − | − | − | + | − | − | − | − |
| ASSAY0501 | − | − | − | + | − | − | − | − | − | − |
| ASSAY0502 | − | − | − | − | + | − | + | − | − | − |
| ASSAY0504 | − | − | − | − | + | + | − | + | − | − |
| ASSAY0506 | + | − | − | − | − | − | − | − | − | − |
| ASSAY0507 | − | − | − | − | − | − | + | − | − | − |
| ASSAY0509 | − | − | − | − | − | − | − | + | − | − |
| ASSAY0510 | − | − | − | − | − | − | − | + | − | − |
| ASSAY0511 | − | − | − | − | − | − | + | − | − | − |
| ASSAY0512 | − | − | − | − | + | + | − | − | − | + |
| ASSAY0513 | − | − | − | + | − | − | − | + | − | − |
| ASSAY0514 | − | − | − | + | − | − | − | − | − | − |
| ASSAY0516 | − | − | − | − | + | − | − | − | − | − |
| ASSAY0517 | + | − | − | + | − | − | − | + | − | − |
| ASSAY0518 | + | − | − | − | − | − | − | + | − | − |
| ASSAY0521 | − | − | − | − | − | − | − | + | + | + |
| ASSAY0523 | + | − | − | − | + | − | − | − | − | − |
| ASSAY0524 | − | − | − | − | − | − | − | − | + | − |
| ASSAY0526 | + | − | − | + | − | − | − | − | − | − |
| ASSAY0527 | − | − | − | + | − | − | − | − | − | − |
| ASSAY0531 | − | − | − | − | − | + | − | − | − | − |
| ASSAY0532 | + | − | − | − | − | − | + | − | + | − |
| ASSAY0533 | − | − | − | − | − | − | − | − | − | + |
| ASSAY0534 | − | − | − | − | + | − | − | + | + | + |
| ASSAY0535 | + | − | − | + | − | − | − | − | − | + |
| ASSAY0537 | − | − | − | + | − | − | + | − | − | − |
| ASSAY0538 | + | − | − | − | + | − | − | − | − | − |
| ASSAY0539 | + | − | − | − | − | − | − | − | − | − |
| ASSAY0540 | − | − | − | − | + | + | − | − | − | − |
| ASSAY0541 | − | − | − | − | + | + | − | − | − | + |
| ASSAY0542 | − | − | − | − | − | − | + | − | − | − |
| ASSAY0543 | + | − | − | − | + | + | − | − | − | − |
| ASSAY0544 | − | − | − | − | + | − | − | − | − | − |
| ASSAY0545 | − | − | − | − | − | − | − | + | − | − |
| ASSAY0546 | + | − | − | − | + | − | − | − | + | − |
| ASSAY0547 | − | − | − | − | − | + | + | − | − | − |
| ASSAY0548 | − | − | − | + | − | − | − | + | − | − |
| ASSAY0549 | + | − | − | + | − | − | − | + | − | − |
| ASSAY0550 | + | − | − | + | − | − | − | − | − | − |
| ASSAY0551 | − | − | − | − | + | − | − | − | − | − |
| ASSAY0552 | − | − | − | − | + | − | − | − | − | − |
| ASSAY0553 | + | − | − | + | − | − | + | + | − | − |
| ASSAY0555 | − | − | − | + | − | − | − | − | − | − |
| ASSAY0558 | − | − | − | + | − | − | − | − | − | + |
| ASSAY0559 | − | − | − | + | − | − | − | + | − | − |
| ASSAY0560 | − | − | − | − | + | − | − | − | − | − |
| ASSAY0561 | − | − | − | − | − | − | − | + | − | − |
| ASSAY0562 | − | − | − | + | − | − | − | − | − | + |
| ASSAY0563 | − | − | − | − | + | − | − | − | − | − |
| ASSAY0565 | − | − | − | − | + | − | − | − | − | − |
| ASSAY0566 | + | − | − | − | + | − | − | + | − | + |
| ASSAY0567 | − | − | − | − | − | − | − | + | − | − |
| ASSAY0568 | − | − | − | − | + | − | − | + | − | + |
| ASSAY0569 | − | − | − | + | − | − | − | − | − | − |
| ASSAY0570 | − | − | − | − | − | − | + | − | − | − |
| ASSAY0572 | − | − | − | + | + | − | − | + | − | − |
| ASSAY0573 | − | − | − | − | − | − | − | + | − | − |
| ASSAY0574 | − | − | − | − | − | − | − | + | − | − |
| ASSAY0575 | − | − | − | − | − | − | − | + | − | − |
| ASSAY0576 | + | − | − | − | − | + | − | − | − | − |
| ASSAY0577 | − | − | − | + | − | − | − | + | − | − |
| ASSAY0578 | − | − | − | − | − | − | − | + | − | − |
| ASSAY0579 | − | − | − | − | + | + | − | − | − | − |
| ASSAY0580 | + | − | − | − | − | − | − | − | − | − |
| ASSAY0582 | − | − | − | − | − | + | − | − | − | − |
| ASSAY0583 | − | − | − | − | − | − | − | + | − | − |
| ASSAY0584 | + | − | − | + | − | − | + | − | − | − |
| ASSAY0585 | − | − | − | − | + | − | − | − | − | − |
| ASSAY0587 | + | − | − | − | − | − | − | − | − | − |
| ASSAY0588 | + | − | − | + | + | + | − | − | − | − |
| ASSAY0591 | − | − | − | + | − | − | − | + | − | − |
| ASSAY0593 | − | − | − | − | + | − | − | + | + | + |
| ASSAY0596 | − | − | − | − | − | − | − | + | − | − |
| ASSAY0597 | − | − | − | + | + | − | − | − | − | − |
| ASSAY0598 | + | − | − | + | − | − | − | − | − | − |
| ASSAY0599 | − | − | − | + | + | − | − | + | − | − |
| ASSAY0600 | + | − | − | − | − | − | − | − | − | − |
| ASSAY0601 | − | − | − | − | − | − | − | + | − | − |
| ASSAY0603 | − | − | − | − | + | − | − | − | − | + |
| ASSAY0604 | − | − | − | − | − | + | − | − | − | − |
| ASSAY0607 | + | − | − | − | − | − | − | − | − | − |
| ASSAY0608 | − | − | − | + | − | − | − | − | − | − |
| ASSAY0611 | − | − | − | − | + | − | − | − | − | + |
| ASSAY0612 | − | − | − | − | + | − | − | − | − | − |
| ASSAY0613 | − | − | − | − | − | − | − | + | − | − |
| ASSAY0614 | + | − | − | + | − | − | − | + | − | + |
| ASSAY0615 | − | − | − | − | − | − | + | − | − | − |
| ASSAY0616 | − | − | − | − | − | − | − | + | − | − |
| ASSAY0617 | − | − | − | − | + | − | − | − | − | − |
| ASSAY0618 | − | − | − | − | + | − | − | − | − | − |
| ASSAY0619 | − | − | − | − | + | + | + | − | − | − |
| ASSAY0621 | − | − | − | − | − | − | + | − | − | + |
| ASSAY0623 | + | − | − | − | − | − | − | − | − | − |
| ASSAY0624 | − | − | − | + | + | − | − | + | − | − |
| ASSAY0625 | − | − | − | − | + | − | − | + | + | + |
| ASSAY0626 | − | − | − | − | − | − | − | + | − | − |
| ASSAY0627 | − | − | − | − | + | − | − | − | − | − |
| ASSAY0628 | − | − | − | − | + | − | − | − | − | − |
| ASSAY0629 | − | − | − | − | − | − | − | + | − | − |
| ASSAY0632 | − | − | − | − | + | + | − | − | + | + |
| ASSAY0633 | − | − | − | − | − | − | − | + | − | − |
| ASSAY0634 | + | − | − | − | + | − | + | − | − | − |
| ASSAY0637 | − | − | − | + | + | + | − | + | − | − |
| ASSAY0638 | + | − | − | − | + | − | − | + | − | + |
| ASSAY0640 | − | − | − | − | − | − | − | + | − | − |
| ASSAY0641 | − | − | − | − | + | + | + | − | − | − |
| ASSAY0642 | + | − | − | − | − | − | − | − | − | − |
| ASSAY0643 | − | − | − | + | − | − | − | − | − | − |
| ASSAY0644 | − | − | − | − | − | − | − | + | − | − |
| ASSAY0645 | − | − | − | + | + | + | − | + | − | − |
| ASSAY0647 | + | − | − | − | − | − | − | − | − | − |
| ASSAY0648 | + | − | − | − | + | − | − | + | − | + |
| ASSAY0649 | − | − | − | − | − | − | − | + | − | − |
| ASSAY0650 | − | − | − | − | − | − | − | + | − | − |
| ASSAY0651 | + | − | − | + | − | − | − | + | − | − |
| ASSAY0653 | − | − | − | + | + | − | − | − | − | − |
| ASSAY0654 | − | − | − | − | + | − | − | − | − | + |
| ASSAY0655 | + | − | − | + | − | − | − | + | − | − |
| ASSAY0656 | + | − | − | + | + | + | − | + | − | − |
| ASSAY0657 | − | − | − | − | + | − | − | − | − | − |
| ASSAY0659 | − | − | − | − | − | + | − | − | − | − |
| ASSAY0660 | − | − | − | − | + | + | − | + | − | − |
| ASSAY0661 | − | − | − | + | − | − | − | + | + | + |
| ASSAY0662 | + | − | − | − | − | − | − | − | − | − |
| ASSAY0664 | + | − | − | + | − | − | − | − | − | − |
| ASSAY0665 | − | − | − | − | + | + | − | − | − | − |
| ASSAY0666 | − | − | − | − | − | − | − | − | + | − |
| ASSAY0667 | + | − | − | − | − | + | + | − | − | − |
| ASSAY0668 | − | − | − | + | − | − | − | + | − | − |
| ASSAY0669 | + | − | − | − | − | − | − | − | − | − |
| ASSAY0670 | − | − | − | + | − | − | − | − | − | − |
| ASSAY0671 | − | − | − | + | − | − | − | − | − | − |
| ASSAY0672 | − | − | − | − | + | + | − | − | − | − |
| ASSAY0673 | + | − | − | − | − | − | − | − | − | − |
| ASSAY0674 | − | − | − | + | − | − | − | − | + | − |
| ASSAY0675 | + | − | − | − | − | − | − | − | − | − |
| ASSAY0676 | − | − | − | − | + | + | + | − | − | − |
| ASSAY0677 | + | − | − | + | + | + | − | − | − | − |
| ASSAY0678 | − | − | − | − | − | + | + | − | − | − |
| ASSAY0679 | − | − | − | − | − | − | − | − | + | − |
| ASSAY0682 | − | − | − | + | − | − | + | − | − | − |
| ASSAY0683 | − | − | − | + | + | − | + | − | + | − |
| ASSAY0684 | − | − | − | + | + | + | − | + | + | + |
| ASSAY0686 | + | − | − | − | + | + | − | + | + | + |
| ASSAY0687 | − | − | − | − | − | − | − | + | − | − |
| ASSAY0689 | − | − | − | − | − | − | − | − | + | + |
| ASSAY0691 | − | − | − | + | − | − | − | − | − | − |
| ASSAY0692 | − | − | − | + | − | − | − | − | − | − |
| ASSAY0693 | − | − | − | + | − | − | − | − | − | − |
| ASSAY0695 | − | − | − | + | − | − | − | + | − | − |
| ASSAY0696 | − | − | − | − | − | + | − | − | − | − |
| ASSAY0697 | − | − | − | − | + | − | − | − | − | − |
| ASSAY0698 | + | − | − | − | − | − | − | − | − | − |
| ASSAY0699 | − | − | − | + | − | − | − | − | − | − |
| ASSAY0701 | + | − | − | − | − | − | − | − | − | − |
| ASSAY0702 | + | − | − | + | − | − | − | + | − | − |
| ASSAY0703 | − | − | − | − | − | − | − | − | − | + |
| ASSAY0704 | − | − | − | − | − | + | − | − | − | − |
| ASSAY0706 | − | − | − | + | − | − | − | − | − | − |
| ASSAY0709 | − | − | − | + | − | + | − | − | − | + |
| ASSAY0710 | − | − | − | − | + | + | − | − | − | + |
| ASSAY0712 | − | − | − | − | − | + | − | + | − | − |
| ASSAY0713 | − | − | − | + | + | + | − | + | − | − |
| ASSAY0714 | − | − | − | − | + | + | − | − | − | + |
| ASSAY0715 | − | − | − | − | + | + | − | − | − | − |
| ASSAY0716 | + | − | − | − | − | − | − | − | − | − |
| ASSAY0718 | − | − | − | − | − | − | − | − | + | + |
| ASSAY0719 | − | − | − | − | + | − | − | − | + | + |
| ASSAY0720 | − | − | − | + | + | − | − | − | − | + |
| ASSAY0722 | − | − | − | − | − | − | − | + | − | − |
| ASSAY0723 | + | − | − | − | + | − | − | − | − | − |
| ASSAY0724 | − | − | − | − | − | + | − | − | − | − |
| ASSAY0725 | − | − | − | − | − | − | − | + | − | − |
| ASSAY0726 | − | − | − | − | − | + | − | − | + | + |
| ASSAY0727 | − | − | − | − | − | − | − | + | − | − |
| ASSAY0728 | + | − | − | − | + | − | − | − | − | − |
| ASSAY0729 | + | − | − | − | − | − | + | − | − | − |
| ASSAY0733 | − | − | − | − | + | − | − | − | − | − |
| ASSAY0734 | + | − | − | + | − | − | − | + | − | − |
| ASSAY0736 | − | − | − | − | + | + | − | − | − | − |
| ASSAY0739 | − | − | − | − | + | − | − | − | − | − |
| ASSAY0740 | − | − | − | − | − | − | − | − | + | + |
| ASSAY0741 | − | − | − | + | + | + | + | − | + | − |
| ASSAY0743 | − | − | − | − | + | + | + | − | − | − |
| ASSAY0744 | − | − | − | − | − | − | − | + | − | − |
| ASSAY0745 | − | − | − | + | − | − | − | + | − | − |
| ASSAY0746 | − | − | − | − | + | − | − | − | − | − |
| ASSAY0748 | − | − | − | − | + | + | − | + | − | + |
| ASSAY0749 | + | − | − | − | − | + | − | − | − | − |
| ASSAY0750 | − | − | − | + | − | − | − | − | − | − |
| ASSAY0751 | − | − | − | + | − | − | + | − | − | − |
| ASSAY0752 | − | − | − | + | + | − | − | − | − | − |
| ASSAY0753 | − | − | − | − | + | + | + | − | − | + |
| ASSAY0754 | − | − | − | + | + | − | − | + | + | + |
| ASSAY0755 | + | − | − | + | − | − | − | − | − | − |
| ASSAY0756 | − | − | − | − | + | − | − | − | + | − |
| ASSAY0758 | − | − | + | + | − | − | − | − | − | + |
| ASSAY0759 | + | − | + | + | − | − | − | − | − | − |
| ASSAY0760 | − | − | − | − | + | − | − | − | − | − |
| ASSAY0762 | − | − | − | + | − | − | − | − | − | − |
| ASSAY0763 | + | − | − | + | − | − | − | + | − | − |
| ASSAY0766 | − | − | − | + | − | − | − | − | − | − |
| ASSAY0767 | + | − | − | + | − | − | − | − | − | − |
| ASSAY0771 | + | − | − | − | − | − | − | − | − | − |
| ASSAY0772 | + | − | − | − | − | − | − | − | − | − |
| ASSAY0773 | − | − | − | + | − | − | − | − | − | − |
| ASSAY0774 | − | − | − | + | − | − | − | − | − | − |
| ASSAY0778 | − | − | − | + | − | − | − | + | − | − |
| ASSAY0780 | − | − | − | − | + | + | − | − | − | − |
| ASSAY0781 | − | − | − | − | + | − | − | + | − | − |
| ASSAY0782 | + | − | − | + | − | − | − | − | − | + |
| ASSAY0784 | − | − | − | + | − | − | − | + | − | − |
| ASSAY0785 | + | − | − | − | − | − | − | − | − | − |
| ASSAY0786 | − | − | − | − | − | − | − | − | + | − |
| ASSAY0790 | + | − | − | + | − | − | − | − | − | − |
| ASSAY0792 | + | − | − | + | − | − | − | − | − | − |
| ASSAY0793 | − | − | − | + | − | − | − | − | − | − |
| ASSAY0794 | − | − | − | + | − | − | − | − | − | − |
| ASSAY0795 | + | − | − | + | − | − | − | + | + | − |
| ASSAY0797 | + | − | − | − | + | + | + | + | − | − |
| ASSAY0798 | − | − | − | − | + | − | − | − | − | − |
| ASSAY0799 | − | − | − | − | + | − | − | − | + | − |
| ASSAY0801 | − | − | − | + | − | − | − | − | − | − |
| ASSAY0802 | − | − | − | − | + | + | − | − | − | − |
| ASSAY0804 | − | − | − | − | − | − | + | − | − | − |
| ASSAY0805 | + | − | − | − | + | − | − | − | − | − |
| ASSAY0806 | − | − | − | + | − | − | − | + | − | − |
| ASSAY0807 | − | − | − | − | + | + | − | − | − | − |
| ASSAY0809 | − | − | − | + | − | − | − | − | − | − |
| ASSAY0810 | − | − | − | − | + | + | − | − | − | − |
| ASSAY0811 | − | − | − | + | − | − | − | − | − | − |
| ASSAY0814 | + | − | − | − | + | + | + | − | − | − |
| ASSAY0817 | + | − | − | − | − | − | − | − | − | − |
| ASSAY0818 | − | − | − | − | − | + | − | + | − | − |
| ASSAY0819 | + | − | − | − | + | + | − | − | − | − |
| ASSAY0820 | − | − | − | + | − | + | + | + | − | + |
| ASSAY0821 | − | − | − | + | − | − | − | + | − | − |
| ASSAY0822 | − | − | − | + | − | − | − | + | − | − |
| ASSAY0826 | − | − | − | + | + | − | + | − | − | − |
| ASSAY0827 | − | − | − | − | + | + | − | − | − | + |
| ASSAY0831 | − | − | − | − | + | − | − | − | − | − |
| ASSAY0833 | + | − | − | + | − | − | − | − | − | − |
| ASSAY0834 | − | − | − | − | + | + | − | − | − | − |
| ASSAY0835 | − | − | − | + | − | − | − | − | − | + |
| ASSAY0836 | − | − | − | − | + | + | + | − | − | + |
| ASSAY0838 | + | − | − | + | − | − | − | − | − | − |
| ASSAY0841 | + | − | − | − | − | − | − | − | − | − |
| ASSAY0842 | + | − | − | + | − | − | − | + | − | − |
| ASSAY0843 | − | − | − | + | − | − | − | + | − | − |
| ASSAY0844 | − | − | − | − | + | + | + | + | − | − |
| ASSAY0846 | − | − | − | − | + | − | − | − | − | − |
| ASSAY0847 | + | − | − | − | − | − | − | − | − | − |
| ASSAY0850 | − | − | − | + | − | − | − | − | − | − |
| ASSAY0853 | + | − | − | − | − | − | − | − | − | − |
| ASSAY0854 | − | − | − | − | + | + | − | − | − | − |
| ASSAY0856 | − | − | − | − | + | + | + | − | − | + |
| ASSAY0857 | − | − | − | − | + | − | − | − | − | − |
| ASSAY0858 | − | − | − | − | + | + | − | − | − | − |
| ASSAY0859 | − | − | − | + | − | − | − | − | − | − |
| ASSAY0861 | + | − | − | − | + | − | − | − | − | − |
| ASSAY0862 | − | − | − | + | − | − | − | + | − | − |
| ASSAY0863 | − | − | − | + | − | − | − | − | − | − |
| ASSAY0865 | − | − | − | − | + | − | − | − | − | − |
| ASSAY0866 | − | − | − | − | − | − | − | + | − | − |
| ASSAY0867 | − | − | − | + | − | − | − | − | − | − |
| ASSAY0869 | − | − | − | − | − | − | − | − | − | + |
| ASSAY0871 | − | − | − | − | + | + | + | − | − | − |
| ASSAY0874 | − | − | − | − | − | − | − | + | + | − |
| ASSAY0876 | − | − | − | + | + | − | − | + | − | − |
| ASSAY0878 | + | − | + | − | − | − | − | − | − | − |
| ASSAY0879 | − | − | − | + | − | − | − | − | − | − |
| ASSAY0882 | − | − | − | − | + | − | − | + | − | − |
| ASSAY0883 | − | − | − | + | − | − | − | − | − | − |
| ASSAY0885 | − | − | − | − | − | − | − | + | − | − |
| ASSAY0886 | + | − | − | + | + | − | − | + | − | + |
| ASSAY0887 | − | − | − | − | − | − | − | + | − | − |
| ASSAY0888 | − | − | − | − | + | + | + | − | − | − |
| ASSAY0893 | − | − | − | − | + | − | − | − | − | − |
| ASSAY0894 | − | − | − | − | + | − | − | − | − | − |
| ASSAY0895 | − | − | − | − | − | − | − | + | − | − |
| ASSAY0897 | − | − | − | + | − | − | − | − | − | − |
| ASSAY0899 | − | − | − | − | − | − | − | + | − | + |
| ASSAY0900 | + | − | − | − | + | + | − | − | − | + |
| ASSAY0903 | + | − | − | − | − | − | − | − | − | − |
| ASSAY0904 | + | − | − | + | − | − | − | − | − | + |
| ASSAY0906 | − | − | + | − | − | − | − | − | − | − |
| ASSAY0907 | − | − | − | + | − | − | − | − | − | − |
| ASSAY0910 | + | − | − | − | − | − | − | − | − | − |
| ASSAY0911 | − | − | − | + | − | − | − | − | − | − |
| ASSAY0912 | − | − | − | − | − | − | − | + | + | + |
| ASSAY0913 | − | − | − | + | − | − | − | − | − | − |
| ASSAY0914 | − | − | − | + | + | − | + | − | − | − |
| ASSAY0916 | − | − | − | − | + | + | + | − | − | − |
| ASSAY0917 | + | − | − | − | − | − | − | − | − | − |
| ASSAY0919 | − | − | − | + | − | − | − | + | − | + |
| ASSAY0921 | − | − | − | − | − | − | − | + | − | − |
| ASSAY0922 | + | − | − | + | − | − | − | + | − | − |
| ASSAY0923 | − | − | − | − | + | + | − | − | − | + |
| ASSAY0924 | − | − | − | − | + | − | − | − | − | − |
| ASSAY0925 | − | − | − | − | + | − | + | − | − | − |
| ASSAY0927 | − | − | − | − | − | − | − | + | − | − |
| ASSAY0928 | + | − | − | − | − | − | − | − | − | − |
| ASSAY0929 | − | − | − | − | + | − | − | − | − | − |
| ASSAY0931 | − | − | − | + | − | − | − | − | − | − |
| ASSAY0933 | − | − | − | − | + | − | − | − | − | − |
| ASSAY0934 | − | − | − | − | + | − | − | − | − | − |
| ASSAY0935 | − | − | − | + | − | − | − | + | + | − |
| ASSAY0936 | − | − | − | − | + | − | − | − | − | − |
| ASSAY0938 | + | − | − | − | − | − | − | − | − | − |
| ASSAY0939 | − | − | − | + | − | − | − | − | − | − |
| ASSAY0941 | − | − | − | − | + | − | + | + | − | − |
| ASSAY0943 | + | − | − | − | − | − | − | − | − | − |
| ASSAY0944 | − | − | − | + | + | − | − | − | − | − |
| ASSAY0947 | − | − | − | + | − | − | + | + | − | − |
| ASSAY0948 | + | − | − | + | − | − | − | − | − | − |
| ASSAY0950 | + | − | − | + | + | − | − | − | − | − |
| ASSAY0951 | − | − | − | − | + | − | − | − | − | − |
| ASSAY0953 | + | − | − | − | − | − | − | − | − | − |
| ASSAY0957 | − | − | − | + | − | − | − | + | − | − |
| ASSAY0959 | − | − | − | + | − | + | − | − | − | − |
| ASSAY0960 | + | − | − | − | − | − | − | + | + | − |
| ASSAY0962 | − | − | − | + | + | + | − | + | + | + |
| ASSAY0964 | − | − | − | + | − | − | − | − | − | − |
| ASSAY0966 | − | − | − | + | − | + | − | − | − | + |
| ASSAY0968 | − | − | − | + | − | − | − | − | − | − |
| ASSAY0969 | − | − | − | + | − | − | − | + | − | − |
| ASSAY0970 | − | − | − | − | + | − | − | − | − | − |
| ASSAY0971 | + | − | − | + | − | − | − | + | − | − |
| ASSAY0976 | + | − | − | − | − | − | + | − | − | − |
| ASSAY0978 | + | − | − | + | − | − | − | − | − | − |
| ASSAY0980 | − | − | − | − | + | − | − | − | − | − |
| ASSAY0982 | − | − | − | − | + | − | − | − | − | − |
| ASSAY0983 | + | − | − | − | − | − | − | − | − | − |
| ASSAY0985 | + | − | − | − | − | − | − | − | − | − |
| ASSAY0986 | − | − | − | − | − | − | − | + | − | − |
| ASSAY0987 | − | − | − | − | − | − | − | + | − | − |
| ASSAY0988 | − | − | − | − | − | + | − | − | − | − |
| ASSAY0990 | − | − | − | + | − | − | − | − | − | − |
| ASSAY0992 | + | − | − | − | − | − | − | − | + | − |
| ASSAY0994 | − | − | − | + | − | − | − | − | − | − |
| ASSAY0996 | + | − | − | − | + | + | − | − | − | − |
| ASSAY0997 | − | − | − | − | − | − | − | + | − | − |
| ASSAY0998 | + | − | − | − | + | − | − | − | − | − |
| ASSAY1000 | + | − | − | − | + | + | − | − | + | − |
| ASSAY1001 | − | − | − | − | + | − | − | − | − | − |
| ASSAY1002 | − | − | − | − | − | − | − | + | − | − |
| ASSAY1004 | − | − | − | − | + | − | − | + | − | − |
| ASSAY1006 | + | − | − | + | − | − | − | − | − | − |
| ASSAY1007 | − | − | − | − | − | − | − | + | − | − |
| ASSAY1010 | + | − | − | − | + | − | − | − | − | − |
| ASSAY1011 | + | − | − | − | − | − | − | − | − | − |
| ASSAY1012 | + | − | − | − | − | − | − | − | − | − |
| ASSAY1014 | − | − | − | − | − | − | + | − | − | − |
| ASSAY1017 | + | − | + | − | − | − | − | − | − | − |
| ASSAY1018 | + | − | − | − | − | − | − | − | − | − |
| ASSAY1019 | − | − | − | − | − | − | − | + | − | − |
| ASSAY1022 | − | − | − | + | − | − | − | − | − | − |
| ASSAY1023 | − | − | − | + | − | − | + | − | − | − |
| ASSAY1024 | + | − | − | + | − | − | − | − | − | + |
| ASSAY1025 | + | − | + | + | + | − | − | − | − | − |
| ASSAY1026 | + | − | − | + | + | − | + | + | − | − |
| ASSAY1029 | − | − | − | + | − | − | − | − | − | − |
| ASSAY1030 | − | − | − | − | + | − | − | − | − | − |
| ASSAY1033 | + | − | − | − | − | − | − | − | − | − |
| ASSAY1035 | − | − | − | − | − | − | + | − | − | + |
| ASSAY1036 | − | − | − | + | + | − | − | − | − | − |
| ASSAY1037 | + | − | − | − | − | − | − | + | − | − |
| ASSAY1039 | − | − | − | + | − | − | − | + | + | + |
| ASSAY1040 | + | − | − | − | − | − | − | − | − | − |
| ASSAY1041 | + | − | − | − | − | − | − | − | − | − |
| ASSAY1042 | − | − | − | − | + | − | − | + | − | − |
| ASSAY1044 | + | − | − | − | − | − | − | − | − | − |
| ASSAY1045 | − | − | − | + | − | − | − | − | − | − |
| ASSAY1046 | − | − | − | + | − | − | − | − | − | − |
| ASSAY1047 | + | − | − | − | − | − | − | − | + | − |
| ASSAY1048 | − | − | − | − | + | − | − | − | − | − |
| ASSAY1051 | − | − | − | − | − | − | − | + | − | − |
| ASSAY1052 | − | − | − | + | − | − | − | − | − | − |
| ASSAY1053 | − | − | − | + | − | − | − | − | − | − |
| ASSAY1055 | − | − | − | − | − | − | − | − | − | + |
| ASSAY1056 | + | − | − | − | + | − | − | − | − | − |
| ASSAY1057 | − | − | − | + | − | − | − | − | − | − |
| ASSAY1058 | + | − | − | − | − | − | − | + | − | − |
| ASSAY1059 | + | − | − | + | − | − | − | + | − | − |
| ASSAY1061 | − | − | − | + | − | − | − | + | − | − |
| ASSAY1063 | − | − | − | + | − | − | − | − | − | − |
| ASSAY1064 | − | − | − | − | + | − | − | + | − | − |
| ASSAY1065 | − | − | + | − | − | − | − | − | − | − |
| ASSAY1066 | − | − | − | − | − | + | − | − | − | − |
| ASSAY1071 | − | − | − | − | − | + | − | − | − | − |
| ASSAY1074 | − | − | − | + | − | − | − | − | − | − |
| ASSAY1075 | + | − | − | − | − | − | − | − | − | − |
| ASSAY1077 | − | − | − | − | − | − | − | − | + | − |
| ASSAY1078 | − | − | − | + | − | − | − | + | − | − |
| ASSAY1079 | + | − | − | − | − | − | − | − | − | + |
| ASSAY1081 | + | − | − | − | − | − | − | − | + | − |
| ASSAY1082 | − | − | − | + | − | − | − | − | − | − |
| ASSAY1083 | − | − | − | − | + | − | − | − | − | − |
| ASSAY1084 | − | − | − | + | + | − | − | + | − | + |
| ASSAY1086 | + | − | − | − | − | − | − | − | − | − |
| ASSAY1087 | − | − | − | − | − | + | − | − | − | − |
| ASSAY1088 | + | − | − | + | + | − | − | − | − | − |
| ASSAY1090 | − | − | − | + | − | − | − | − | − | − |
| ASSAY1093 | − | − | − | + | − | − | − | + | + | − |
| ASSAY1094 | + | − | − | + | − | − | − | − | − | − |
| ASSAY1095 | + | − | − | − | − | + | − | − | − | − |
| ASSAY1096 | − | − | − | + | + | − | − | − | − | − |
| ASSAY1097 | − | − | − | + | − | − | − | + | − | − |
| ASSAY1099 | + | − | − | − | − | − | − | − | − | + |
| ASSAY1100 | − | − | − | − | + | − | − | − | − | − |
| ASSAY1101 | − | − | + | + | + | − | − | − | − | − |
| ASSAY1102 | + | − | − | + | − | − | − | − | − | − |
| ASSAY1103 | + | − | − | − | − | − | − | + | − | − |
| ASSAY1104 | + | − | − | − | + | − | − | − | − | + |

TABLE 2
Informative probes for Stable MCI versus Converting MCI
Assays with p values <0.05 are marked with an asterisk.

| Sequence No. | | | | |
|---|---|---|---|---|
| (DiaGenic | | Gene | | Context Sequence |
| Assay ID) | TaqMan Assay ID | Symbol | Gene name | (Oligonucleotide sequence) |
| ASSAY0006 | Hs00220373_m1 | SLC12A9 | solute carrier family 12 | CTCCGGCCTCGGTGGCATGAAGCCC |
| | | | (potassium/chloride | |
| | | | transporters), | |
| | | | member 9 | |
| ASSAY0012 | Hs00158122_m1 | ISG20 | interferon stimulated | GCATCCAGAACAGCCTGCTTGGACA |
| | | | exonuclease gene 20 kDa | |
| ASSAY0015* | Hs00174469_m1 | KLRB1 | killer cell lectin-like | TTCCTCGGGATGTCTGTCAGGGTTC |
| | | | receptor subfamily B, | |
| | | | member 1 | |
| ASSAY0017 | Hs00179345_m1 | MAP4K1 | mitogen-activated | CTCTCTCAGGAAAGACCCCCCACCT |
| | | | protein kinase kinase | |
| | | | kinase kinase 1 | |
| ASSAY0027 | Hs00191312_m1 | NMT2 | N-myristoyltransferase | TTCGGATTTATGACAGTGTGAAGAA |
| | | | 2 | |
| ASSAY0032 | Hs00200394_m1 | RASSF1 | Ras association | GAGGTGAACTGGGACGCCTTCAGCA |
| | | | (RaIGDS/AF-6) | |
| | | | domain family member 1 | |
| ASSAY0037 | Hs00218384_m1 | CAND1 | cullin-associated and | GTACAACTAAGGTAAAGGCAAACTC |
| | | | neddylation- | |
| | | | dissociated 1 | |
| ASSAY0040 | Hs00219196_m1 | YIPF1 | Yip1 domain family, | TGGGCTGCTTGGCATACTTTTTTGA |
| | | | member 1 | |
| ASSAY0044 | Hs00219931_m1 | LARS | leucyl-tRNA synthetase | TTTTCAGCAGATGGAATGCGTTTGG |
| ASSAY0046 | Hs00220176_m1 | ENY2 | enhancer of yellow 2 | CGCGGTGATGGTGGTTAGCAAGATG |
| | | | homolog (Drosophila) | |
| ASSAY0053 | Hs00221104_m1 | ABHD6 | abhydrolase domain | CGTGTGTCCTGCTGGCCTGCAGTAC |
| | | | containing 6 | |
| ASSAY0063 | Hs00223860_m1 | ZMAT3 | zinc finger, matrin | AGTACAGAATAATTCAGCAGGTCCT |
| | | | type 3 | |
| ASSAY0065 | Hs00224328_m1 | CRTC3 | CREB regulated | TACCTCCCAGATGGTGTCCTCAGAC |
| | | | transcription | |
| | | | coactivator 3 | |
| ASSAY0069* | Hs00225647_m1 | GNPTAB | N-acetylglucosamine-1- | TCGGAGAGGTGGTTCTGGAATGGAG |
| | | | phosphate transferase, | |
| | | | alpha and beta subunits | |
| ASSAY0084 | Hs00229849_m1 | ADPGK | ADP-dependent | GCATTGTCCATCAGGTCTTTCCCGC |
| | | | glucokinase | |
| ASSAY0085* | Hs00229911_m1 | APH1B | anterior pharynx | TCATCGCCGGAGCTTTCTTCTGGTT |
| | | | defective 1 homolog B | |
| | | | (C. elegans) | |
| ASSAY0087 | Hs00230261_m1 | CD99L2 | CD99 molecule-like 2 | GCATTCAGCAGGGTCTCAACGCAGA |
| ASSAY0088 | Hs00230572_m1 | TM2D2 | TM2 domain containing 2 | GTTGTCTCAAGTTCGGCGGTCAGGC |
| ASSAY0093* | Hs00233856_m1 | LRP1 | low density lipoprotein | CCCCTGAGATTTGTCCACAGAGTAA |
| | | | receptor-related | |
| | | | protein 1 | |
| ASSAY0103 | Hs00154250_m1 | CASP6 | caspase 6, apoptosis- | GTGTTACTCTGTTGCAGAAGGATAT |
| | | | related cysteine | |
| | | | peptidase | |
| ASSAY0112* | Hs00157403_m1 | EPHX2 | epoxide hydrolase 2, | ACGTGACAGTAAAGCCCAGGGTCCG |
| | | | cytoplasmic | |
| ASSAY0116 | Hs00158113_m1 | IRF5 | interferon regulatory | CCGCAGACAGACCCCTCTGCCATGA |
| | | | factor 5 | |
| ASSAY0117* | Hs00158114_m1 | IRF5 | interferon regulatory | ACACCATCTTCAAGGCCTGGGCCAA |
| | | | factor 5 | |
| ASSAY0120 | Hs00159668_m1 | NRD1 | nardilysin (N-arginine | TGTCACAAGCACAGAATCTATGGAT |
| | | | dibasic convertase) | |
| ASSAY0122 | Hs00160118_m1 | PLD1 | phospholipase D1, | CTTAAACGAAAAGCACAACAAGGAG |
| | | | phosphatidylcholine- | |
| | | | specific | |
| ASSAY0126* | Hs00162077_m1 | SOAT1 | sterol O- | CCATCTTGCCAGGTGTGCTGATTCT |
| | | | acyltransferase 1 | |
| ASSAY0128 | Hs00163761_m1 | BTK | Bruton | GTCAGGACTGAGCACACAGGTGAAC |
| | | | agammaglobulinemia | |
| | | | tyrosine kinase | |
| ASSAY0138 | Hs00171585_m1 | CREG1 | cellular repressor of | TGAGCAACCTGCAGGAGAATCCATA |
| | | | E1A-stimulated genes 1 | |
| ASSAY0141 | Hs00173570_m1 | GRN | granulin | GTCGGACGCAGGCAGACCATGTGGA |
| ASSAY0147* | Hs00174179_m1 | ACE | angiotensin I converting | AAGGACTTCCGGATCAAGCAGTGCA |
| | | | enzyme (peptidyl- | |
| | | | dipeptidase A) 1 | |
| ASSAY0150* | Hs00174705_m1 | CD163 | CD163 molecule | ACCTGCTCAGCCCACAGGGAACCCA |
| ASSAY0153 | Hs00175195_m1 | CTSG | cathepsin G | GCTGGGGAAGCAATATAAATGTCAC |
| ASSAY0157 | Hs00175591_m1 | PRNP | prion protein | CACGACCGAGGCAGAGCAGTCATTA |
| ASSAY0158 | Hs00176666_m1 | ITPKB | inositol 1,4,5- | GCAAGATGGGAATCAGGACCTACCT |
| | | | triphosphate 3-kinase B | |
| ASSAY0160* | Hs00176973_m1 | PRKCA | protein kinase C, alpha | GAACCACAAGCAGTATTCTATGCGG |
| ASSAY0165 | Hs00177790_m1 | STK17B | serine/threonine | TGATATTGGAATATGCTGCAGGTGG |
| | | | kinase 17b | |
| ASSAY0178 | Hs00186661_m1 | NCOA1 | nuclear receptor | CACCTCAGCCACCCCTGAATGCTCA |
| | | | coactivator 1 | |
| ASSAY0183 | Hs00188713_m1 | BAG3 | BCL2-associated | GGGCCCCAAGGAGACTCCATCCTCT |
| | | | athanogene 3 | |
| ASSAY0195 | Hs00165445_m1 | PEPD | peptidase D | GAGTTGGAAAGCCTCTTCGAGCACT |
| ASSAY0198 | Hs00174128_m1 | TNF | tumor necrosis factor | TAGCCCATGTTGTAGCAAACCCTCA |
| | | | (TNF superfamily, | |
| | | | member 2) | |
| ASSAY0207 | Hs00196206_m1 | GZMA | granzyme A (granzyme 1, | CCTGCTAATTCCTGAAGATGTCTGT |
| | | | cytotoxic T-lymphocyte- | |
| | | | associated serine | |
| | | | esterase 3) | |
| ASSAY0211 | Hs00203341_m1 | CNOT4 | CCR4-NOT transcription | GATAATTCCCAGCAGATATCTAACA |
| | | | complex, subunit 4 | |
| ASSAY0221 | Hs00215267_m1 | TMEM127 | transmembrane protein | CCCGGACCTGCTGAAAGATTTCTGC |
| | | | 127 | |
| ASSAY0222* | Hs00215631_m1 | MARCH1 | membrane-associated | AGGACATCTGCAGAATCTGTCACTG |
| | | | ring finger (C3HC4) 1 | |
| ASSAY0226 | Hs00220138_m1 | LXN | latexin | ACAAGCCAGCATGGAGGATATTCCA |
| ASSAY0232 | Hs00255879_m1 | GFOD1 | glucose-fructose | AAACCCTAGGCATCGGCAAGAACGT |
| | | | oxidoreductase domain | |
| | | | containing 1 | |
| ASSAY0234 | Hs00266026_m1 | IGFBP7 | insulin-like growth | GCACCTGCGAGCAAGGTCCTTCCAT |
| | | | factor binding protein 7 | |
| ASSAY0245 | Hs00326671_m1 | TTC14 | tetraticopeptide | AGAGAGAGGAGGACAGTTAGAAGAA |
| | | | repeat domain 14 | |
| ASSAY0246* | Hs00330168_m1 | DNHD1 | dynein heavy chain | GGGCGCTGGAGTCAAGTGACTCTAA |
| | | | domain 1 | |
| ASSAY0251* | Hs00367259_m1 | GOLGA8B; | golgin A8 family member | AGAAGCCGGATGGGTTCTCGAGCCG |
| | | GOLGA8A | B; golgin A8 family, | |
| | | | member A | |
| ASSAY0252 | Hs00369741_m1 | SELM | selenoprotein M | CGCGCCCGGGTAGAGACCTGCGGGG |
| ASSAY0259 | Hs00415782_m1 | TMEM179B | transmembrane | CTCGGACCCAGGGCTCCTTCAGTGG |
| | | | protein 179B | |
| ASSAY0265 | Hs00606772_g1 | SH3BGRL3 | SH3 domain binding | CACCGGCTCCCGCGAAATCAAGTCC |
| | | | glutamic acid-rich | |
| | | | protein like 3 | |
| ASSAY0273 | Hs00910358_s1 | MDM4 | Mdm4 p53 binding | TGCATTCTTGCCTAGTTTTCCTTAT |
| | | | protein homolog (mouse) | |
| ASSAY0278 | Hs01092416_s1 | N/A | N/A | GTGTGAAGATCCAGCCTGATGCCCA |
| ASSAY0289 | Hs00194817_m1 | ARPC1B | actin releated protein | CGCGGGAGGAGCCAAGCCGCCATGG |
| | | | 2/3 complex, subunit | |
| | | | 1B, 41 kDa | |
| ASSAY0302 | Hs00198676_m1 | TCERG1 | transcription | TACTCCATGGTGTGTCGTTTGGACT |
| | | | elongation regulator 1 | |
| ASSAY0307 | Hs00199894_m1 | CD160 | CD160 molecule | GGCCCTTCAAGCTTTGTAAGCCTTG |
| ASSAY0315* | Hs00201734_m1 | CCNDBP1 | cyclin D-type | TGCCGTCTCCACAGGAAACCCAGAA |
| | | | binding-protein 1 | |
| ASSAY0316* | Hs00201825_m1 | FBXO7 | F-box protein 7 | ATCTGCGTGATTTTCGAGACAATAC |
| ASSAY0321 | Hs00202956_m1 | PRPF6 | PRP6 pre-mRNA | CGTGGCCAAGCTGTTTTGGAGTCAG |
| | | | processing factor 6 | |
| | | | homolog (S. cerevisiae) | |
| ASSAY0334 | Hs00206922_m1 | CP110 | CP110 protein | TCTCCACTGCTTAACATTGAGAAAA |
| ASSAY0335 | Hs00207926_m1 | SEC24D | SEC24 family, member D | CAGCAAGCCAGCTTATTCTACCAGA |
| | | | (S. cerevisiae) | |
| ASSAY0338 | Hs00209768_m1 | C17orf81 | chromosome 17 open | GATATCAACAATCGGCTGGTTTACC |
| | | | reading frame 81 | |
| ASSAY0339 | Hs00209887_m1 | ABHD14A | abhydrolase domain | GCCCTTGACCTTCCAGGTTTTGGGA |
| | | | containing 14A | |
| ASSAY0340 | Hs00210194_m1 | SIPA1L1 | signal-induced | ACTAGAGAGGCGGCTGTCTCCTGGT |
| | | | proliferation- | |
| | | | associated 1 like 1 | |
| ASSAY0347 | Hs00211458_m1 | C2orf28 | chromosome 2 open | GGCACCATCTTGGGGCTGGATCTCC |
| | | | reading frame 28 | |
| ASSAY0368* | Hs00216278_m1 | CEP192 | centrosomal protein | GCGCCAGAGAGTAAACTACAAATTC |
| | | | 192 kDa | |
| ASSAY0374 | Hs00218284_m1 | TBC1D2 | TBC1 domain family, | CTTCTGACGAAGTGCGCCTACCTCC |
| | | | member 2 | |
| ASSAY0370 | Hs00607710_m1 | ZCCHC9 | zinc finger, CCHC | GGCAAAGAAAAATGCAATGGTGTGT |
| | | | domain containing 9 | |
| ASSAY0380 | Hs00609603_m1 | ACVR2B | activin A receptor, | ATTGCCCACAGGGACTTTAAAAGTA |
| | | | type IIB | |
| ASSAY0382 | Hs00706913_g1 | PCNP | PEST proteolytic | AATGTAGGCAAACTATCAATTTTTT |
| | | | signal containing | |
| | | | nuclear protein | |
| ASSAY0386 | Hs00255388_m1 | LUC7L2 | LUC7-like 2 | GTAGCAGCAAAGGCAGAACGTGTTC |
| | | | (S. cerevisiae) | |
| ASSAY0391* | Hs00272972_m1 | MYST2 | MYST histone | CCAGGCACCAGGCACCAACGGAGAG |
| | | | acetyltransferase 2 | |
| ASSAY0397 | Hs00369386_s1 | N/A | N/A | ACCTCCCTCCCATGGAAGTGCTGTC |
| ASSAY0400 | Hs00379387_m1 | RAD54L2 | RAD54-like 2 | GGCTGCCTCAGGTTCCCAGGGACCT |
| | | | (S. cerevisiae) | |
| ASSAY0405* | Hs00415453_g1 | TRA@ | T cell receptor alpha | TGGATTCAGTTGGCATGGGTGAGCA |
| | | | locus | |
| ASSAY0412 | Hs00607978_s1 | CXCR4 | chemokine (C-X-C motif) | TCCTGTCCTGCTATTGCATTATCAT |
| | | | receptor 4 | |
| ASSAY0414 | Hs00608252_m1 | ZNF207 | zinc finger protein 207 | AGCACAGCACAAGCTCAGGCAGCTG |
| ASSAY0421* | Hs00609836_m1 | AARS | alanyl-tRNA synthetase | CAAAATTTGGGGCTGGATGACACCA |
| ASSAY0424 | Hs00610438_m1 | IDE | insulin-degrading | AGACCAGAAAATGTCCGGGTTGCCA |
| | | | enzyme | |
| ASSAY0426 | Hs00610505_m1 | FSTL3 | follistatin-like 3 | CCGCTGCCGCAAGTCCTGTGAGCAC |
| | | | (secreted glycoprotein) | |
| ASSAY0431* | Hs00612292_m1 | TRA@ | T cell receptor alpha | CTGTGTTTCTGACCTTTGGAACTAT |
| | | | locus | |
| ASSAY0436 | Hs00702907_s1 | RBM17 | RNA binding motif | CAAGTGGGTTTGCAAGGAGACCAGA |
| | | | protein 17 | |
| ASSAY0441 | Hs00708570_s1 | PSENEN | presenilin enhancer | TGGGGCCCTGCTTATTCTCCCAGGA |
| | | | 2 homolog (C. elegans) | |
| ASSAY0445 | Hs00740463_m1 | CSNK1A1 | casein kinase 1, | GGCAAGGGCTAAAGGCTGCAACAAA |
| | | | alpha 1 | |
| ASSAY0446 | Hs00740591_m1 | FAHD2A | fumarylacetoacetate | CGCCGCGGCCAGGCTCTGATGCTGG |
| | | | hydrolase domain | |
| | | | containing 2A | |
| ASSAY0460 | Hs00759012_s1 | MTRF1L | mitochondrial | CGGACTAAGGATGCGGTCCCGGGTT |
| | | | translational release | |
| | | | factor 1-like | |
| ASSAY0461 | Hs00762253_s1 | PIGH | phosphatidylinositol | AAAAAACAAGCCCTTCAGTACTGGT |
| | | | glycan anchor | |
| | | | biosynthesis, class H | |
| ASSAY0472 | Hs00234637_m1 | NKTR | natural killer-tumor | AATCGGCGGTCCAGGAGTTGTAGAT |
| | | | recognition sequence | |
| ASSAY0474 | Hs00235003_m1 | PTGDR | prostaglandin D2 | GCCCGTAATTTATCGCGCTTACTAT |
| | | | receptor (DP) | |
| ASSAY0476 | Hs00236976_m1 | ITGB1 | integrin, beta 1 | TGTGGCGCGTGCAGGTGCAATGAAG |
| | | | (fibronectin receptor, | |
| | | | beta polypeptide, | |
| | | | antigen CD29 includes | |
| | | | MDF2, MSK12) | |
| ASSAY0479 | Hs00240906_m1 | SNCA | synuclein, alpha (non | GTGGCAACAGTGGCTGAGAAGACCA |
| | | | A4 component of amyloid | |
| | | | precursor) | |
| ASSAY0483 | Hs00243655_s1 | CDK5R1 | cyclin-dependent kinase | CCGGAAGGCCACGCTGTTTGAGGAT |
| | | | 5, (regulatory subunit | |
| | | | 1 (p35) | |
| ASSAY0484 | Hs00244704_m1 | CDC25B | cell division cycle 25 | GGCGGAGCAGACGTTTGAACAGGCC |
| | | | homolog B (S. pombe) | |
| ASSAY0485 | Hs00247369_m1 | USP21 | ubiquitin specific | TCTGATGACAAGATGGCTCATCACA |
| | | | peptidase 21 | |
| ASSAY0491 | Hs00250236_s1 | KIF21B | kinesin family | CCCAACATCCATGAGACACCCCGAG |
| | | | member 21B | |
| ASSAY0500* | Hs00256558_m1 | WHSC1L1 | Wolf-Hirschhorn | TTACAGAAAGGTGCCAGCGAGATTT |
| | | | syndrome candidate | |
| | | | 1-like 1 | |
| ASSAY0506 | Hs00257942_m1 | TSEN2 | tRNA splicing | AAGGGCCTAGAATACCTCCTCTGAA |
| | | | endonuclease 2 homolog | |
| | | | (S. cerevisiae) | |
| ASSAY0517 | Hs00261978_m1 | PYROXD2 | pyridine nucleotide- | TGGTGGCTGCAGCGTACCTGCAGAG |
| | | | disulplide oxido- | |
| | | | deructase domain 2 | |
| ASSAY0518 | HS00262488_m1 | FIZ1 | FLT3-interacting zinc | TGCACCACCAGGTCGTCCACACTGG |
| | | | finger 1 | |
| ASSAY0523 | Hs00264679_m1 | CST3 | cystatin C | CGCCCGCAAGCAGATCGTAGCTGGG |
| ASSAY0526 | Hs00266011_m1 | DNAJA1 | DnaJ (Hsp40) homolog, | CTCAGCCCGCACCGGCAGTAGAAGA |
| | | | subfamily A, member 1 | |
| ASSAY0532 | Hs00267168_s1 | MC1R | melanocortin 1 | GCAGGACGCTCAAGGAGGTGCTGAC |
| | | | receptor (alpha | |
| | | | melanocyte stimulating | |
| | | | hormone receptor) | |
| ASSAY0535* | Hs00268342_m1 | SORL1 | sortilin-related | CAACAAGCGGTACATCTTTGCAGAC |
| | | | receptor, L(DLR class) | |
| | | | A repeats-containing | |
| ASSAY0538 | Hs00269779_m1 | GGT5 | gamma-glutamyltrans- | TCAGCCAGGAGGTGCAGAGGGGACT |
| | | | ferase 5 | |
| ASSAY0539 | Hs00269993_m1 | DLX2 | distal-less homeobox 2 | AACGAGCCTGAGAAGGAGGACCTTG |
| ASSAY0543 | Hs00272235_m1 | EIF3M | eukaryotic translation | AGAAGAGTGATGCTGCTTCAAAAGT |
| | | | initiation factor 3, | |
| | | | subunit M | |
| ASSAY0546 | Hs00272828_m1 | ZFP36L2 | zinc finger protein | GTCGACTTCTTGTGCAAGACAGAGA |
| | | | 36, C3H type-like 2 | |
| ASSAY0549 | Hs00273329_s1 | NAT6 | N-acetyltransferase 6 | CCGCACCTCCCGCCTGCACTCCCTG |
| | | | (GCN5-related) | |
| ASSAY0550* | Hs00273392_s1 | LDOC1 | leucine zipper, down- | AACCCCAGCTATTGGCCAGGCCCCT |
| | | | regulated in cancer 1 | |
| ASSAY0553 | Hs00275656_m1 | GSK3B | glycogen synthase | AGAAATAATCAAGGTCCTGGGAACT |
| | | | kinase 3 beta | |
| ASSAY0566 | Hs00293370_m1 | SPPL3 | signal peptide | TATTTAAAGGGCGACCTCCGGCGGA |
| | | | peptidase 3 | |
| ASSAY0576 | Hs00326979_m1 | SYNE1 | spectrin repeat | CAAGCTCGAGGCTCTATTATCAGTC |
| | | | containing, nuclear | |
| | | | envelope 1 | |
| ASSAY0580 | Hs00332198_s1 | FNIP2 | folliculin interacting | ACTTTCCCTCATTCACCACCTTCCA |
| | | | protein 2 | |
| ASSAY0584* | Hs00356601_m1 | CCR2 | chemokine (C-C motif) | GCCACAAGCTGAACAGAGAAAGTGG |
| | | | receptor 2 | |
| ASSAY0587 | Hs00360266_g1 | NFYC | nuclear transcription | GATGGACAGCAGCTCTACCAGATCC |
| | | | factor Y, gamma | |
| ASSAY0588 | Hs00360923_g1 | CRELD2 | cysteine-rich with | TCCAAGTACGAGTCCAGCGAGATTC |
| | | | EGF-like domains 2 | |
| ASSAY0598* | Hs00364877_m1 | NCRNA00219 | non-protein coding | AAAGGTGACCTGAAGGATGTCCTTG |
| | | | RNA 219 | |
| ASSAY0600 | Hs00365842_m1 | CX3CR1 | chemokine (C-X3-C | GGCAGTCCACGCCAGGCCTTCACCA |
| | | | motif) receptor 1 | |
| ASSAY0607 | Hs00370295_m1 | AGAP4; | ArfGAP with GTPase | CGGGAGATGCCTGAAGCTTTGGAGT |
| | | AGAP7; | domain, ankyrin repeat | |
| | | AGAP6; | and PH domain 4; ArfGAP | |
| | | AGAP8 | with GTPase domain, | |
| | | | ankyrin repeat and PH | |
| | | | domain 7; ArfGAP with | |
| | | | GTPase domain, ankyrin | |
| | | | repeat and PH domain 6; | |
| | | | ArfGAP with GTPase | |
| | | | domain, ankyrin repeat | |
| | | | and PH domain 8 | |
| ASSAY0614 | Hs00373045_m1 | GAB2 | GRB2-associated | GAGAGCACAGACTCCCTGAGAAATG |
| | | | binding protein 2 | |
| ASSAY0623 | Hs00376384_m1 | CCDC52 | coiled-coil domain | GCTACACAGGCAAGACTTCAGCAGT |
| | | | containing 52 | |
| ASSAY0634* | Hs00379889_m1 | PQLC3 | PQ loop repeat | GACCTGGCCATGAATCTATGTACTT |
| | | | containing 3 | |
| ASSAY0638 | Hs00384448_m1 | PARS2 | prolyl-tRNA | GGCTGGGATTGCGGTGCCTGTGCTT |
| | | | synthetase 2, | |
| | | | mitochondrial (putative) | |
| ASSAY0642 | Hs00385559_m1 | NT5DC1 | 5-nucleotidase | TTTCCGGACACTCGAGAATGATGAG |
| | | | domain containing 1 | |
| ASSAY0647 | Hs00388932_m1 | MGST3 | microsomal glutathione | TTACCACCCGCGTATAGCTTCTGGC |
| | | | S-transferase 3 | |
| ASSAY0648* | Hs00389570_m1 | SEC16A | SEC16 homolog A | AACCTAAGAAGGGTGAATCCTGGTT |
| | | | (S. cerevisiae) | |
| ASSAY0651* | Hs00391737_m1 | SMG6 | Smg-6 homolog, | ACGCAAGACAGTAAAATATGCCTTG |
| | | | nonsense mediated | |
| | | | mRNA decay factor | |
| | | | (C. elegans) | |
| ASSAY0655 | Hs00394683_m1 | LST1 | leukodyte specific | AGGCCACAAGCTCTGGATGAGGAAC |
| | | | transcript 1 | |
| ASSAY0656* | Hs00395045_m1 | STMN3 | stathmin-like 3 | CCAGTACGGGGACATGGAGGTGAAG |
| ASSAY0662 | Hs00405478_m1 | PDE8B | phosphodiesterase 8B | GAAGCAGTGTGCAGGTCGATCCGGG |
| ASSAY0664 | Hs00405872_m1 | CYTSA | cytospin A | GTGCAGCGCGTGTTCTTGGGGAAGA |
| ASSAY0667 | Hs00409956_g1 | GPS2 | G protein pathway | CTCCGACTCATCCTCTCTGCGCCCC |
| | | | supressor 2 | |
| ASSAY0669 | Hs00411442_m1 | C14orf43 | chromosome 14 open | TGCAGAAGCTGATCCAGACCAAGAC |
| | | | reading frame 43 | |
| ASSAY0673 | Hs00413676_g1 | TRAV20 | T cell receptor alpha | TTCAGCTTGGCTGGTTGAGTGGAGA |
| | | | variable 20 | |
| ASSAY0675 | Hs00414663_m1 | CALCOCO2 | calcium binding and | GCATCTTTAGAGTGGGGTGGAAGAC |
| | | | coiled-coil domain 2 | |
| ASSAY0677 | Hs00414889_m1 | ANKRD36B | ankyrin repeat domain | GAAGGAAAGGACTGCCCTACATTTG |
| | | | 36B | |
| ASSAY0696* | Hs00418955_m1 | SMCHD1 | structural maintenance | AAGGATTTTAAATGGACAGGAACAG |
| | | | of chromosomes | |
| | | | flexible hinge domain | |
| | | | containing 1 | |
| ASSAY0698 | Hs00428757_m1 | DDX17 | DEAD (Asp-Glu-Ala-Asp) | TGACCGTGGAGGATTTGGAGCAAGA |
| | | | box polypeptide 17 | |
| ASSAY0701 | Hs00429827_m1 | RBMX2 | RNA binding motif | ATGGGATCAAGATCAAAGGAAGAAC |
| | | | protein, X-linked 2 | |
| ASSAY0702 | Hs00429977_m1 | SHISA5 | shisa homolog 5 | CCGGGTGCACGTGGTGAGGTGTGTA |
| | | | (Xenopus laevis) | |
| ASSAY0716 | Hs00539429_s1 | CHCHD8 | coiled-coil-helix- | GATCTGGAGTTGAGAGCCATGGGTT |
| | | | coiled-coil-helix | |
| | | | domain containing 8 | |
| ASSAY0723 | Hs00542109_m1 | FBXL16 | F-box and leucine- | ACGGACGCAGGCCTCGAGGTTATGC |
| | | | rich repeat protein 16 | |
| ASSAY0728 | Hs00544515_s1 | C14orf139 | chromosome 14 open | CCAGGGGACGGGAGCAGGTACCCAC |
| | | | reading frame 139 | |
| ASSAY0729 | Hs00559804_m1 | CAPN1 | calpain 1, (mu/l) | AAACTACCCAGCCACCTTCTGGGTG |
| | | | large subunit | |
| ASSAY0734 | Hs00602957_m1 | HN1 | hematological and | CCAAGTCAGCAGGTGCCAAGTCTAG |
| | | | neurological expressed 1 | |
| ASSAY0749 | Hs00833126_g1 | MAPK6 | mitogen-activated | CTGAGCCTTGTTGGCAATACTCAGA |
| | | | protein kinase 6 | |
| ASSAY0755 | Hs00891617_s1 | N/A | N/A | ACAGTTGTTTATGGTAGGAGGACTA |
| ASSAY0759* | Hs00900829_g1 | IL23A | interleukin 23, alpha | CCTCAGCCAACTCCTGCAGCCTGAG |
| | | | subunit p19 | |
| ASSAY0763 | Hs00907493_m1 | TRA2B | transformer 2 beta | ATCAGATTTATAGAAGGCGGTCACC |
| | | | homolog (Drosophila) | |
| ASSAY0767 | Hs00921653_m1 | RBM19 | RNA binding motif | CCGCTCACTTTCACGAGCCCCCGAA |
| | | | protein 19 | |
| ASSAY0771 | Hs00930963_m1 | PLAC8 | placenta-specific 8 | TACTAATTTCCACTGCTTTTAAGGC |
| ASSAY0772 | Hs00930964_g1 | PLAC8 | placenta-specific 8 | CCCGATATGGCATCCCTGGATCTAT |
| ASSAY0782 | Hs00945401_m1 | ANXA1 | annexin A1 | TGCCAAGCCATCCTGGATGAAACCA |
| ASSAY0785* | Hs00949547_g1 | CTBP2 | C-terminal binding | TGCCGGCGAGCTCGGAATTGCCGTG |
| | | | protein 2 | |
| ASSAY0790 | Hs00963390_g1 | CCT8 | chaperonin containing | GTGGTTTTTAAGCATGAAAAGGAAG |
| | | | TCP1, subunit 8 (theta) | |
| ASSAY0792 | Hs00967069_m1 | DNAJC13 | DnaJ (Hsp40) homolog, | AGCAGGATACCTCACAGGACCTGGA |
| | | | subfamily C, member 13 | |
| ASSAY0795 | Hs00971411_m1 | ANXA3 | annexin A3 | TTACTGTTGGCCATAGTTAATTGTG |
| ASSAY0797 | Hs00975865_m1 | BTK | Bruton | TTATCCCTTCCAGGTTGTATATGAT |
| | | | agammaglobulinemia | |
| | | | tyrosine kinase | |
| ASSAY0805 | Hs00996794_m1 | EPB42 | erythrocyte membrane | GAGAGGAGCTACAGATTCCGTTCAG |
| | | | protein band 4.2 | |
| ASSAY0814 | Hs01013056_g1 | GLUL | glutamate-ammonia | TCTGAAGTACATCGAGGAGGCCATT |
| | | | ligase (glutamine | |
| | | | synthetase) | |
| ASSAY0817 | Hs01017895_m1 | CSNK1D | casein kinase 1, delta | GGCTACCCTTCCGAATTTGCCACAT |
| ASSAY0819 | Hs01030693_m1 | ARHGAP17 | Rho GTPase activating | CCAAGATAGTAACAGACTCCAATTC |
| | | | protein 17 | |
| ASSAY0833 | Hs01051024_g1 | SETDB1 | SET domain, bifurcated 1 | TCCCAACCCTTCTTGAACTGGGTCT |
| ASSAY0838 | Hs01056146_m1 | DDX21 | DEAD (Asp-Glu-Ala-Asp) | AACAGAAATACAGGAGAAATGGCAT |
| | | | box polypeptide 21 | |
| ASSAY0841 | Hs01061967_g1 | LSM2 | LSM2 homolog, U6 small | CTCACATGTTATCAGTGAAGAACTG |
| | | | nuclear RNA associated | |
| | | | (S. cerevisiae) | |
| ASSAY0842 | Hs01062739_m1 | TMX4 | thioredoxin-related | TCTGAGCGTTCTGAGCAGAATCGGA |
| | | | transmembrane protein 4 | |
| ASSAY0847 | Hs01067777_m1 | TF | transferrin | TGTCCCACAGAACACTGGGGGAAAA |
| ASSAY0853 | Hs01081697_m1 | IL2RB | interleukin 2 | AGGAGACGTCCAGAAGTGGCTCTCT |
| | | | receptor, beta | |
| ASSAY0861 | Hs01093019_m1 | GSPT1 | G1 to S phase | CAGAGAAACTTGGTACTTGTCTTGG |
| | | | transition 1 | |
| ASSAY0878 | Hs01380343_m1 | DEGS2 | degenerative sperm- | CTACAACCTGCCGCTGGTGCGGAAG |
| | | | atocyte homolog 2, lipid | |
| | | | desaturase (Drosophila) | |
| ASSAY0886 | Hs01564142_m1 | GLIPR1 | GLI pathogenesis- | CTATACATGACTTGGGACCCAGCAC |
| | | | related 1 | |
| ASSAY0900 | Hs01636043_s1 | SRP9 | signal recognition | TGCTGTTGTGACCAATAAATATAAA |
| | | | particle 9 kDa | |
| ASSAY0903 | Hs01691047_sH | N/A | N/A | CCTCTAACAAAACTAAGCTGTCTGG |
| ASSAY0904 | Hs01885851_s1 | LTB4R2 | leukotriene B4 | CTACGGCCTTGGCCTTCTTCAGTTC |
| | | | receptor 2 | |
| ASSAY0910 | Hs01924685_g1 | COX6A1 | cytochrome c oxidase | AGAGAATCTGGACCACTACCCGGGC |
| | | | subunit Via poly- | |
| | | | peptide 1 | |
| ASSAY0917 | Hs02339924_g1 | RPL7L1 | ribosomal protein L7- | TGGCAAAGAAGGAGCAGAAGAAAGG |
| | | | like 1 | |
| ASSAY0922 | Hs02597217_g1 | GNG10; | guanine nucleotide | GAGAGGATCAAGGTCTCTCAGGCAG |
| | | LOC653503 | binding protein (G | |
| | | | protein), gamma 10; | |
| | | | GNG10 pseudogene | |
| ASSAY0928 | Hs03043885_g1 | RPL13A; | ribosomal protein L13a; | CCCTACGACAAGAAAAAGCGGATGG |
| | | RPL13AP5 | ribosomal protein L13a | |
| | | | pseudogene 5 | |
| ASSAY0938 | Hs01092525_m1 | LDLR | low density lipoprotein | ACGTGCTTGTCTGTCACCTGCAAAT |
| | | | receptor | |
| ASSAY0943 | Hs99999035_m1 | IL10 | interleukin 10 | GAAGACTTTCTTTCAAATGAAGGAT |
| ASSAY0948 | Hs00203146_m1 | C11orf2 | chromosome 11 open | ATCTCAGCCACAGACACCATCCGGA |
| | | | reading frame 2 | |
| ASSAY0950 | Hs01123468_m1 | DIDO1 | death inducer- | ATGCGGTGCTCAGGCAGGTATTAAA |
| | | | obliterator 1 | |
| ASSAY0953 | Hs00323153_m1 | NBEAL2 | neurobeachin-like 2 | CGCAGAGGTTGTCAGTGATGGTGTA |
| ASSAY0960 | Hs00984297_m1 | C1orf175 | chromosome 1 open | AATGAAGTGAAAGCTGCTCTGGATA |
| | | | reading frame 175 | |
| ASSAY0971 | Hs00391048_m1 | MEGF9 | multiple EGF-like- | GTGCAACAGTTCTGGGAAATGCCAG |
| | | | domains 9 | |
| ASSAY0976 | Hs00376366_m1 | CCDC12 | coiled-coil domain | CAAACCGGTTGCAGTGGAGGAGAAG |
| | | | containing 12 | |
| ASSAY0978* | Hs00830212_s1 | CALM2 | calmodulin 2 | GTTTAGCCACTTAAAATCTGCTTAT |
| | | | (phosphorylase kinase, | |
| | | | delta) | |
| ASSAY0983 | Hs00198609_m1 | MTMR11 | myotubularin related | GCCACCAGGCTCCGGTGTTTCTCCT |
| | | | protein 11 | |
| ASSAY0985 | Hs00296956_m1 | ANKRD44 | ankyrin repeat domain 44 | TGGAATTGCTTTTGGAAAGAACAAA |
| ASSAY0992 | Hs00293951_m1 | LOC375925 | hypothetical protein | CCCCGCTCAGTTCAATATTTCAAGT |
| | | | LOC375295 | |
| ASSAY0996 | Hs00369838_s1 | GPR82 | G protein-coupled | ATGGGAATATCAATCTGCTCAATGC |
| | | | receptor 82 | |
| ASSAY0998 | Hs00162661_m1 | TMBIM6 | transmembrane BAX | CACTCATTTCATTCAGGCTGGCCTG |
| | | | inhibitor motif | |
| | | | containing 6 | |
| ASSAY1000 | Hs00403541_m1 | FAM129C | family with sequence | CTGCCCTGAATCCTTGGGAGACCAT |
| | | | similarity 129, member C | |
| ASSAY1006* | Hs00228595_m1 | GON4L | gon-4-like (C. elegans) | GATGTGGGGAATGAAGATGAAGCAG |
| ASSAY1010 | Hs00394748_m1 | AGRN | agrin | GAGTTCTGTGTGGAAGATAAACCCG |
| ASSAY1011 | Hs00185803_m1 | MFAP5 | microfibrillar | GATGACTTGGCCTCCCTCAGTGAAA |
| | | | associated protein 5 | |
| ASSAY1012 | Hs00173310_m1 | KCNIP3 | Kv channel interacting | GGGCCATCCACTTTGAGGACTTTGT |
| | | | protein 3, calsenilin | |
| ASSAY1017 | Hs00894734_m1 | PTPRC | protein tyrosine | GCTTTTAATACCACAGGTGTTTCAT |
| | | | phosphatase, receptor | |
| | | | type, C | |
| ASSAY1018 | Hs00608272_m1 | TSC22D3 | TSC22 domain family, | GAACAGGCCATGGATCTGGTGAAGA |
| | | | member 3 | |
| ASSAY1024 | Hs00198650_m1 | CSDE1 | cold shock domain, | TAAAAGTAGGAGATGATGTTGAATT |
| | | | containing E1, RNA- | |
| | | | binding | |
| ASSAY1025 | Hs00182082_m1 | MYD88 | myeloid differentiation | CCCAGCATTGAGGAGGATTGCCAAA |
| | | | primary response gene | |
| | | | (88) | |
| ASSAY1026 | Hs00162271_m1 | SPTBN1 | spectrin, beta, non- | GCTCTGGGCACACAGGTGAGGCAGC |
| | | | erythrocytic 1 | |
| ASSAY1033 | Hs00212914_m1 | CDK12 | cyclin-dependent | CCACTCCCCAGTAGGAAATCCATGA |
| | | | kinase 12 | |
| ASSAY1037 | Hs00300550_m1 | LAMA1 | laminin, alpha 1 | GGCAGAGAGGCCTGTTTCCTGCCAT |
| ASSAY1040* | Hs01107881_m1 | ABCA10 | ATP-binding cassette, | CTCTTTTGTGTTTGTTACTAGTACT |
| | | | sub-family A (ABC1), | |
| | | | member 10 | |
| ASSAY1041 | Hs00430595_m1 | STAG3L4 | stromal antigen 3-like 4 | AAACACAAAGAGCTGCATTAATACT |
| ASSAY1044 | Hs00734523_m1 | ARF1 | ADP-ribosylation | GCAGCCTCTGAGGTGTCCCTGGCCA |
| | | | factor 1 | |
| ASSAY1047 | Hs00398895_m1 | SLMO1 | slowmo homolog 1 | CAATGCAAAGAAGGGGTGGGCTGCT |
| | | | (Drosophila) | |
| ASSAY1056 | Hs00698399_m1 | LRRC50 | leucine rich repeat | TGCCCGATTTGCGTGTACTGAATTT |
| | | | containing 50 | |
| ASSAY1058 | Hs00369593_m1 | RBM33 | RNA binding motif | GAAAATTTCAGTTCTCAGGGTGTTA |
| | | | protein 33 | |
| ASSAY1059* | Hs00195059_m1 | SORBS3 | sorbin and SH3 domain | ATGGCTGGTTTGTGGGTGTCTCCCG |
| | | | containing 3 | |
| ASSAY0175 | Hs00202596_m1 | FBXO9 | F-box protein 9 | CTACATCTGTGCCAGAGACCCTGAA |
| ASSAY1079 | Hs00162564_m1 | TARS | threonyl-tRNA synthetase | CGAGGAGAAGCCGATTGGTGCTGGT |
| ASSAY1081 | Hs00365632_m1 | DGUOK | deoxyguanosine kinase | AGGCTTCTCCCCAGGTTTGTTTGAA |
| ASSAY1086* | Hs00164445_m1 | EPB42 | erythrocyte membrane | GGATGGATGCCCTGGGTATCAAGAG |
| | | | protein band 4.2 | |
| ASSAY1088 | Hs00374213_m1 | GLUL | glutamate-ammonia | TTTCTGTGGCTGGGAACACCTTCCA |
| | | | ligase (glutamine | |
| | | | synthetase) | |
| ASSAY0194 | Hs00289449_m1 | SFI1 | Sfi1 homolog, spindle | GCAGAATGAGATGGCTGAGCGATTC |
| | | | assembly associated | |
| | | | (yeast) | |
| ASSAY1095 | Hs00559595_m1 | ITGB1 | integrin, beta 1 | TTGCTCAAACAGATGAAAATAGATG |
| | | | (fibronectin receptor, | |
| | | | beta polypeptide, | |
| | | | antigen CD29 includes | |
| | | | MDF2, MSK12) | |
| ASSAY1099 | Hs00428461_m1 | CTDSP2 | CTD (carboxy-terminal | CTCACCAAGCAAGGCCTGGTCTCCA |
| | | | domain, RNA polymerase | |
| | | | II, polypeptide A) | |
| | | | small phosphatase 2 | |
| ASSAY1102 | Hs00415445_m1 | RNF216L; | ring finger protein | GAGTGGCGACTCTTTTGAAACAGAT |
| | | RNF216 | 216-like; ring finger | |
| | | | protein 216 | |
| ASSAY1103 | Hs00300475_s1 | SORL1 | sortilin-related | CAGAAGACACACAGCTGCCTGTTCT |
| | | | receptor, L(DLR class) | |
| | | | A repeats-containing | |
| ASSAY1104 | Hs00261330_s1 | NT5DC1 | 5-nucleotidase domain | CATATCGATGCATGCAATGGAAAGA |
| | | | containing 1 | |

TABLE 3
Informative sub-set of probes for Stable MCI versus Converting MCI

| Sequence No. | | | | |
|---|---|---|---|---|
| (DiaGenic | | Gene | | Context Sequence |
| Assay ID) | Assay ID | Symbol | Gene name | (Oligonucleotide sequence) |
| ASSAY0191 | Hs00157817_m1 | GRB2 | growth factor receptor- | GGGGGGACATCCTCAAGGTTTTGAA |
| | | | bound protein 2 | |
| ASSAY0194 | Hs00164370_m1 | CYBA | cytochrome b-245, | GGCCTGATCCTCATCACCGGGGGCA |
| | | | alpha polypeptide | |
| ASSAY0196 | Hs00168402_m1 | IL2RB | interleukin 2 receptor, | GGGCCATGGCTGAAGAAGGTCCTGA |
| | | | beta | |
| ASSAY0197 | Hs00170953_m1 | S100A6 | S100 calcium binding | CCCTACCGCTCCAAGCCCAGCCCTC |
| | | | protein A6 | |
| ASSAY0202 | Hs00182698_m1 | SKAP2 | src kinase associated | CCTCTGATGGAGCCCAGTTTCCTCC |
| | | | phosphoprotein 2 | |
| ASSAY0207 | Hs00196206_m1 | GZMA | granzyme A (granzyme 1, | CCTGCTAATTCCTGAAGATGTCTGT |
| | | | cytotoxic T-lymphocyte- | |
| | | | associated serine | |
| | | | esterase 3) | |
| ASSAY0215 | Hs00208212_m1 | RBM19 | RNA binding motif | ACGAGCCACTAAGCCAGCCGTGACA |
| | | | protein 19 | |
| ASSAY0221 | Hs00215267_m1 | TMEM127 | transmembrane | CCCGGACCTGCTGAAAGATTTCTGC |
| | | | protein 127 | |
| ASSAY0222 | Hs00215631_m1 | MARCH1 | membrane-associated | AGGACATCTGCAGAATCTGTCACTG |
| | | | ring finger (C3HC4) 1 | |
| ASSAY0226 | Hs00220138_m1 | LXN | latexin | ACAAGCCAGCATGGAGGATATTCCA |
| ASSAY0226 | Hs00227667_m1 | DENND2D | DENN/MADD domain | TGGAAGAGGTCCTGCTGGTCAATCT |
| | | | containing 2D | |
| ASSAY0236 | Hs00266763_m1 | GSPT1 | G1 to S phase | CCGTGCGGCACCTGTGGAATCCTCT |
| | | | transition 1 | |
| ASSAY0243 | Hs00292065_m1 | SYTL3 | synaptotagmin-like 3 | GTCACCACCAGGAAGGTCAGTGCAC |
| ASSAY0246 | Hs00330168_m1 | DNHD1 | dynein heavy chain | GGGCGCTGGAGTCAAGTGACTCTAA |
| | | | domain 1 | |
| ASSAY0251 | Hs00367259_m1 | GOLGA8B; | glogin A8 family, | AGAAGCCGGATGGGTTCTCGAGCCG |
| | | GOLGA8A | member B; golden A8 | |
| | | | family, member A | |
| ASSAY0256 | Hs00385050_m1 | RNF166 | ring finger protein 166 | GCGGCCACACGTTCTGCGGGGAGTG |
| ASSAY0262 | Hs00430193_m1 | MAP1S | microtubule-associated | GGAGCTCGAAAGAGGCATCCGGTCT |
| | | | protein 1S | |
| ASSAY0275 | Hs01005146_g1 | LOC651250 | hypothetical LOC651250 | AGCAAGTTCAGAGTTGGATGGTCTA |
| ASSAY0277 | Hs01028786_s1 | ANKRD58 | ankyrin repeat | TCAGCCTCTGACAACCTCCTCCTGA |
| | | | domain 58 | |
| ASSAY0278 | Hs01092416_s1 | N/A | N/A | GTGTGAAGATCCAGCCTGATGCCCA |

TABLE 4
10 genes used for external analysis (stable MCI vs converter MCI)

| Sequence No. | | Gene | | Context Sequence |
|---|---|---|---|---|
| (DiaGenic Assay ID) | Assay ID | Symbol | Gene name | (Oligonucleotide sequence) |
| ASSAY0141 | Hs00173570_m1 | GRN | granulin | GTCGGACGCAGGCAGACCATGTGGA |
| ASSAY0460 | Hs00759012_s1 | MTRF1L | mitochondrial | CGGACTAAGGATGCGGTCCCGGGTT |
| | | | translational release | |
| | | | factor 1-like | |
| ASSAY1025 | Hs00182082_m1 | MYD88 | myeloid differentiation | CCCAGCATTGAGGAGGATTGCCAAA |
| | | | primary response gene | |
| | | | (88) | |
| ASSAY1017 | Hs00894734_m1 | PTPRC | protein kinase | GCTTTTAATACCACAGGTGTTTCAT |
| | | | phosphatase, receptor | |
| | | | type, C | |
| ASSAY0759 | Hs00900829_g1 | IL23A | interleukin 23, alpha | CCTCAGCCAACTCCTGCAGCCTGAG |
| | | | subunit p19 | |
| ASSAY1101 | Hs00536591_g1 | MTG1 | mitochondrial GTPase | CCGAAAAGAGAACCTGGAGTACTGT |
| | | | 1 homolog | |
| | | | (S. cerevisiae) | |
| ASSAY0878 | Hs01380343_m1 | DEGS2 | degenerative | CTACAACCTGCCGCTGGTGCGGAAG |
| | | | spermatocyte homolog | |
| | | | 2, lipid desaturase | |
| | | | (Drosophila) | |
| ASSAY1065 | Hs00205221_m1 | NEK6 | NIMA (never in mitosis | CCTGACCCACAGAGGCATCCCAACA |
| | | | gene a)-related kinase | |
| | | | 6 | |
| ASSAY0906 | Hs01904238_g1 | N/A | N/A | GGACCACCAGCCCCAGTGACAGAAC |
| ASSAY0758 | Hs00898410_g1 | RPL32P3 | ribosomal protein L32 | GCTGGCAGGCACCATGTCGTCCTGT |
| | | | pseudogene 3 | |

TABLE 5
Informative probes for Non-AS versus AS (All probes have p-value <0.5)

| Sequence No. | | Gene | | Context Sequence |
|---|---|---|---|---|
| (DiaGenic probe ID) | Assay ID | Symbol | Gene name | (Oligonucleotide Sequence) |
| ASSAY0001 | Hs00152932_m1 | TLR2 | toll-like receptor 2 | TCAACTGGTAGTTGTGGGTTGAAGC |
| ASSAY0002 | Hs00153510_m1 | MME | membrane metallo- | TGAAGAAAAGGCCTTAGCAATTAAA |
| | | | endopeptidase | |
| ASSAY0003 | Hs00190079_m1 | PFKFB3 | 6-phosphofructo-2- | TGCCCAGATCCTGTGGGCCAAAGCT |
| | | | kinase/fructose-2,6- | |
| | | | biphosphatase 3 | |
| ASSAY0006 | Hs00220373_m1 | SLC12A9 | solute carrier family | CTCCGGCCTCGGTGGCATGAAGCCC |
| | | | 12 (potassium/chloride | |
| | | | transporters), member 9 | |
| ASSAY0010 | Hs00230322_m1 | CRISPLD2 | cysteine-rich secretory | CAGTCTGAAAGCCTGGGGACTCCTC |
| | | | protein LCCL domain | |
| | | | containing 2 | |
| ASSAY0011 | Hs99999905_m1 | GAPDH | glyceraldehyde-3- | GGGCGCCTGGTCACCAGGGCTGCTT |
| | | | phosphatase | |
| | | | dehydrogenase | |
| ASSAY0013 | Hs00163311_m1 | UBE2B | ubiquitin-conjugating | CACCTTTTGAAGATGGTACTTTTAA |
| | | | enzyme E2B (RAD6 | |
| | | | homolog) | |
| ASSAY0017 | Hs00179345_m1 | MAP4K1 | mitogen-activated | CTCTCTCAGGAAAGACCCCCCACCT |
| | | | protein kinase kinase | |
| | | | kinase kinase 1 | |
| ASSAY0027 | HS00191312_m1 | NMT2 | N-myristoyltransferase | TTCGGATTTATGACAGTGTGAAGAA |
| | | | 2 | |
| ASSAY0040 | Hs00219196_m1 | YIPF1 | Yip1 domain family, | TGGGCTGCTTGGCATACTTTTTTGA |
| | | | member 1 | |
| ASSAY0044 | Hs00219931_m1 | LARS | leucyl-tRNA synthetase | TTTTCAGCAGATGGAATGCGTTTGG |
| ASSAY0045 | Hs00220172_m1 | C3orf37 | chromosome 3 open | TTTGAGAAGGATGCAGACTCATCTG |
| | | | reading frame 37 | |
| ASSAY0046 | Hs00220176_m1 | ENY2 | enhancer of yellow 2 | CGCGGTGATGGTGGTTAGCAAGATG |
| | | | homolog (Drosophila) | |
| ASSAY0047 | Hs00220301_m1 | PPAN; | peter pan homolog | ATCAACGTGCACAAGGTGAACCTGA |
| | | PPAN- | (Drosophila); PPAN- | |
| | | P2RY11 | P2RY11 readthrough | |
| ASSAY0048 | Hs00220428_m1 | C1orf63 | chromosome 1 open | ATGGTGCAAAGCCTGAACTGTCGGA |
| | | | reading frame 63 | |
| ASSAY0056 | Hs00221562_m1 | MTMR3 | myotubularin related | TGTGCAGACCAGGGGAGCATCTAAC |
| | | | protein 3 | |
| ASSAY0060 | Hs00223275_m1 | SAMSN1 | SAM domain, SH3 | GATGATTCAACTGAGGCACATGAAG |
| | | | domain and nuclear | |
| | | | localization signals 1 | |
| ASSAY0062 | Hs00223727_m1 | PAPD5 | PAP associated | TTTACAACCAGGTAACGATGTTGGA |
| | | | domain containing 5 | |
| ASSAY0063 | Hs00223860_m1 | ZMAT3 | zinc finger, matrin | AGTACAGAATAATTCAGCAGGTCCT |
| | | | type 3 | |
| ASSAY0065 | Hs00224328_m1 | CRTC3 | CREB regulated | TACCTCCCAGATGGTGTCCTCAGAC |
| | | | transcription | |
| | | | coactivator 3 | |
| ASSAY0067 | Hs00224851_m1 | JMJD4 | jumonji domain | GTGCACAACCTGGATGACACCATCT |
| | | | containing 4 | |
| ASSAY0074 | Hs00226190_m1 | TNFAIP8L2 | tumor necrosis factor, | CCCAGCACAGCAGTGACTGACCACA |
| | | | alpha-induced protein | |
| | | | 8-like 2 | |
| ASSAY0084 | Hs00229849_m1 | ADPGK | ADP-dependent | GCATTGTCCATCAGGTCTTTCCCGC |
| | | | glucokinase | |
| ASSAY0085 | Hs00229911_m1 | APH1B | anterior pharynx | TCATCGCCGGAGCTTTCTTCTGGTT |
| | | | defective 1 homolog B | |
| | | | (C. elegans) | |
| ASSAY0086 | Hs99276716_m1 | SCNM1 | sodium channel | TGCCGCCGGAAGTACAGACCAGAAG |
| | | | modifier 1 | |
| ASSAY0089 | Hs00231324_m1 | SMARCA4 | SWI/SNF related matrix | GAATCCTCACCAGGACCTGCAAGCG |
| | | | associated, actin | |
| | | | dependent regulator of | |
| | | | chromatin subfamily a, | |
| | | | member 4 | |
| ASSAY0092 | Hs00232444_m1 | TCFL5 | transcription factor- | AAAGAGATAGAAGGCGCAGAATCCG |
| | | | like 5 (basic helix- | |
| | | | loop-helix) | |
| ASSAY0098 | Hs00153519_m1 | MME | membrane metallo- | TCCAGGCAATTTCAGGATTATTGGG |
| | | | endopeptidase | |
| ASSAY0103 | Hs00154250_m1 | CASP6 | caspase 6, apoptosis- | GTGTTACTCTGTTGCAGAAGGATAT |
| | | | related cysteine | |
| | | | peptidase | |
| ASSAY0107 | Hs00155735_m1 | AOAH | acyloxyacyl hydrolase | CAAGAAATGGTGCATCTTCCCGAAA |
| | | | (neutrophil) | |
| ASSAY0112 | Hs00157403_m1 | EPHX2 | epoxide hydrolase 2, | ACGTGACAGTAAAGCCCAGGGTCCG |
| | | | cytoplasmic | |
| ASSAY0114 | Hs00157950_m1 | HLA-DOB | major histocompat- | ACAGACTCTCCAGAAGATTTTGTGA |
| | | | ibility complex, class | |
| | | | II, DO beta | |
| ASSAY0017 | Hs00158114_m1 | IRF5 | interferon regulatory | ACACCATCTTCAAGGCCTGGGCCAA |
| | | | factor 5 | |
| ASSAY0119 | Hs00159537_m1 | NBN | nibrin | CCCGGCAGGAGGAGAACCATACAGA |
| ASSAY0120 | Hs00159668_m1 | NRD1 | nardilysin (N-arginine | TGTCACAAGCACAGAATCTATGGAT |
| | | | dibasic convertase) | |
| ASSAY0124 | Hs00160349_m1 | PPP1CB | protein phosphatase 1, | CGAGCTCATCAGGTGGTGGAAGATG |
| | | | catalytic subunit, beta | |
| | | | isozyme | |
| ASSAY0126 | Hs00162077_m1 | SOAT1 | sterol O- | CCATCTTGCCAGGTGTGCTGATTCT |
| | | | acyltransferase 1 | |
| ASSAY0128 | Hs00163761_m1 | BTK | Bruton | GTCAGGACTGAGCACACAGGTGAAC |
| | | | agammaglobulinemia | |
| | | | tyrosine kinase | |
| ASSAY0129 | Hs00164521_m1 | F5 | coagulation factor V | CGAGGAATACAGAGGGCAGCAGACA |
| | | | (proaccelerin, labile | |
| | | | factor) | |
| ASSAY0136 | Hs00170600_m1 | DNAJA3 | DnaJ (Hsp40) | TCAACGTGACGATCCCCCCTGGGAC |
| | | | homolog, subfamily A, | |
| | | | member 3 | |
| ASSAY0141 | Hs00173570_m1 | GRN | granulin | GTCGGACGCAGGCAGACCATGTGGA |
| ASSAY0142 | Hs00174097_m1 | IL1B | interleukin 1, beta | GGATATGGAGCAACAAGTGGTGTTC |
| ASSAY0147 | Hs00174179_m1 | ACE | angiotensin I | AAGGACTTCCGGATCAAGCAGTGCA |
| | | | converting enzyme | |
| | | | (peptidyl-dipeptidase | |
| | | | A) 1 | |
| ASSAY0149 | Hs00174659_m1 | SIGLEC5 | sialic acid binding | GTACCATCACCTCGGGTTCCAGGAA |
| | | | Ig-like lectin 5 | |
| ASSAY0150 | Hs00174705_m1 | CD163 | CD163 molecule | ACCTGCTCAGCCCACAGGGAACCCA |
| ASSAY0151 | Hs00175186_m1 | BPI | bactericidal/perme- | AAGCTGGATAGGCTGCTCCTGGAAC |
| | | | ability-increasing | |
| | | | protein | |
| ASSAY0152 | Hs00175188_m1 | CTSC | cathepsin C | CGGTTATGGGACCACAAGAAAAAAA |
| ASSAY0154 | Hs00175407_m1 | CTSS | cathepsin S | TGTGAAAAACAGCTGGGGCCACAAC |
| ASSAY0155 | Hs00175475_m1 | PGLYRP1 | peptidoglycan | GCGACGTGGGCTACAACTTCCTGAT |
| | | | recognition protein 1 | |
| ASSAY0156 | Hs00175573_m1 | AQP9 | aquaporin 9 | CATCTTGATTGTCCTTGGATGTGGC |
| ASSAY0158 | Hs00176666_m1 | ITPKB | inositol 1,4,5- | GCAAGATGGGAATCAGGACCTACCT |
| | | | triphosphate 3-kinase B | |
| ASSAY0160 | Hs00176973_m1 | PRKCA | protein kinase C, alpha | GAACCACAAGCAGTATTCTATGCGG |
| ASSAY0164 | Hs00177638_m1 | ADAM9 | ADAM metallopeptidase | TGCCACTGGGAATGCTTTGTGTGGA |
| | | | domain 9 (meltrin | |
| | | | gamma) | |
| ASSAY0165 | Hs00177790_m1 | STK17B | serine/threonine | TGATATTGGAATATGCTGCAGGTGG |
| | | | kinase 17b | |
| ASSAY168 | Hs00179987_m1 | FHIT | fragile histidine | CACCTTTTCCATGCAGGATGGCCCC |
| | | | triad gene | |
| ASSAY0171 | Hs00181419_m1 | IGF2R | insulin-like growth | CTTCTGCAGACACTCAAACAGCTAC |
| | | | factor 2 receptor | |
| ASSAY0174 | Hs00183425_m1 | SMAD2 | SMAD family member 2 | TGGACACAGGCTCTCCAGCAGAACT |
| ASSAY0176 | Hs00184625_m1 | ATP6V1C1 | ATPase, H+ trans- | ACCTTCCTGGAATCTCTCTTGATTT |
| | | | porting, lysosomal | |
| | | | 42 kDa, V1 subunit C1 | |
| ASSAY0178 | Hs00186661_m1 | NCOA1 | nuclear receptor | CACCTCAGCCACCCCTGAATGCTCA |
| | | | coactivator 1 | |
| ASSAY0180 | Hs00187845_m1 | BCL2A1 | BCL2-releated protein | AAAACGGAGGCTGGGAAAATGGCTT |
| | | | A1 | |
| ASSAY0183 | Hs00188713_m1 | BAG3 | BCL2-associated | GGGCCCCAAGGAGACTCCATCCTCT |
| | | | athanogene 3 | |
| ASSAY0194 | Hs00164370_m1 | CYBA | cytochrome b-245, | GGCCTGATCCTCATCACCGGGGGCA |
| | | | alpha polypeptide | |
| ASSAY0197 | Hs00170953_m1 | S100A6 | S100 calcium binding | CCCTACCGCTCCAAGCCCAGCCCTC |
| | | | protein A6 | |
| ASSAY0198 | Hs00174128_m1 | TNF | tumor necrosis factor | TAGCCCATGTTGTAGCAAACCCTCA |
| | | | (TNF superfamily, | |
| | | | member 2) | |
| ASSAY1099 | Hs00175295_m1 | TCF12 | transcription factor 12 | GCGCTTGATCCCTTGCAAGCAAAAA |
| ASSAY0200 | Hs00180691_m1 | TACC1 | transforming, acidic | GTCCACTGTGCTTGGGCTGCTGGAG |
| | | | coiled-coil containing | |
| | | | protein 1 | |
| ASSAY0202 | Hs00182692_m1 | SKAP2 | src kinase associated | CCTCTGATGGAGCCCAGTTTCCTCC |
| | | | phosphoprotein 2 | |
| ASSAY0204 | Hs00184390_m1 | TCOF1 | Treacher Collins- | GCATCTCCAGCACAGGTGAAAACCT |
| | | | Franceschetti | |
| | | | syndrome 1 | |
| ASSAY0209 | Hs00200082_m1 | UBL3 | ubiquitin-like 3 | CAATTGGCCAATGGACTGGGAAGAA |
| ASSAY0210 | Hs00203291_m1 | CCDC106 | coiled-coil domain | CTCGGATGGAGGCAGAGGACCACTG |
| | | | containing 106 | |
| ASSAY0215 | Hs00208212_m1 | RBM19 | RNA binding motif | ACGAGCCACTAAGCCAGCCGTGACA |
| | | | protein 19 | |
| ASSAY0221 | Hs00215267_m1 | TMEM127 | transmembrane | CCCGGACCTGCTGAAAGATTTCTGC |
| | | | protein 127 | |
| ASSAY0222 | Hs00215631_m1 | MARCH1 | membrane-associated | AGGACATCTGCAGAATCTGTCACTG |
| | | | ring finger (C3HC4) 1 | |
| ASSAY0226 | Hs00220138_m1 | LXN | latexin | ACAAGCCAGCATGGAGGATATTCCA |
| ASSAY0230 | Hs00228829_m1 | TNKS2 | tankyrase, TRF1- | TGAAACAGCATTGCATTGTGCTGCT |
| | | | interacting ankyrin- | |
| | | | related ADP-ribose | |
| | | | polymerase 2 | |
| ASSAY0246 | Hs00330168_m1 | DNHD1 | dynein heavy chain | GGGCGCTGGAGTCAAGTGACTCTAA |
| | | | domain 1 | |
| ASSAY0247 | Hs00347791_s1 | RPSA; | ribosomal protein SA; | GGTCTGCAGCTCCCACTGCTCAGGC |
| | | RPSAP19; | ribosomal protein SA | |
| | | RPSAP58; | pseudogene 19; ribo- | |
| | | RPSAP9 | somal protein SA | |
| | | | pseudogene 58; | |
| | | | ribosomal protein | |
| | | | SA pseudogene 9 | |
| ASSAY0251 | Hs00367259_m1 | GOLGA8B; | golgin A8 family, | AGAAGCCGGATGGGTTCTCGAGCCG |
| | | GOLGA8A | member B; golgin A8 | |
| | | | family, member A | |
| ASSAY0257 | Hs00397335_m1 | DNAJC13 | DnaJ (Hsp40) | GGTCCAAAGGTTCGAATTACGTTAA |
| | | | homolog, subfamily C, | |
| | | | member 13 | |
| ASSAY0258 | Hs00406040_m1 | LYSMD3 | LysM, putative | TTGTACGGTAGCAGATATCAAGAGA |
| | | | peptidoglycan-binding, | |
| | | | domain containing 3 | |
| ASSAY0265 | Hs00606772_g1 | SH3BGRL3 | SH3 domain binding | CACCGGCTCCCGCGAAATCAAGTCC |
| | | | glutamic acid-rich | |
| | | | protein like 3 | |
| ASSAY0267 | Hs00609831_g1 | AARS | alanyl-tRNA | CGGCGCCTCAGCCAAGGCCCTGAAT |
| | | | synthetase | |
| ASSAY0268 | Hs00705337_s1 | RBM39 | RNA binding motif | AACAGCAGCATATGTACCTCTTCCA |
| | | | protein 39 | |
| ASSAY0269 | Hs00743451_s1 | SUB1 | SUB1 homolog | AACTTAATCTCTTCATGTTCAGTTT |
| | | | (S. cerevisiae) | |
| ASSAY0270 | Hs00754750_s1 | PTP4A2 | protein tyrosine | CCTTTTCCCCCGATCCAAGTTGTAG |
| | | | phosphatase type IVA, | |
| | | | member 2 | |
| ASSAY0278 | Hs01092416_s1 | N/A | N/A | GTGTGAAGATCCAGCCTGATGCCCA |
| ASSAY0280 | Hs01681736_s1 | EP400NL | EP400 N-terminal like | GATATGAATGAATGCTGTGTGGAGC |
| ASSAY0284 | Hs00194045_m1 | ABCA1 | ATP-binding cassette, | ACCCAATCCCAGACACGCCCTGCCA |
| | | | sub-family A (ABC1), | |
| | | | member 1 | |
| ASSAY0289 | Hs00194815_m1 | ARPC1B | actin releated protein | CGCGGGAGGAGCCAAGCCGCCATGG |
| | | | 2/3 complex, subunit | |
| | | | 1B, 41 kDa | |
| ASSAY0290 | Hs00195343_m1 | SMNDC1 | survival motor neuron | GTGAAGATGGACAGTGTTATGAAGC |
| | | | domain containing 1 | |
| ASSAY0292 | Hs00195718_m1 | TAX1BP1 | Tax1 (human T-cell | AAACAACTCTTGCAGGATGAGAAAG |
| | | | leukemia virus type I) | |
| | | | binding protein 1 | |
| ASSAY0293 | Hs00196061_m1 | CEPT1 | choline/ethanolamine | ACAGAGCAGGCACCTCTGTGGGCAT |
| | | | phosphotransferase 1 | |
| ASSAY0302 | Hs00198676_m1 | TCERG1 | transcription | TACTCCATGGTGTGTCGTTTGGACT |
| | | | elongation regulator 1 | |
| ASSAY0315 | Hs00201734_m1 | CCNDBP1 | cyclin D-type binding- | TGCCGTCTCCACAGGAAACCCAGAA |
| | | | protein 1 | |
| ASSAY0319 | Hs00202185_m1 | FTSJ1 | FtsJ homolog 1 | CTTAACCCATTACGCTGGCAAACTG |
| | | | (E. coli) | |
| ASSAY0320 | Hs00202526_m1 | NARF | nuclear prelamin A | AAAAGTCTTGGGGTGCACTATGTAT |
| | | | recognition factor | |
| ASSAY0321 | Hs00202956_m1 | PRPF6 | PRP6 pre-mRNA | CGTGGCCAAGCTGTTTTGGAGTCAG |
| | | | processing factor 6 | |
| | | | homolog (S. cerevisiae) | |
| ASSAY0331 | Hs00204803_m1 | PIK3R5 | phosphoinositide-3- | AGAAGACCCGAGAGGTCCAGGAGAA |
| | | | kinase, regulatory | |
| | | | subunit 5 | |
| ASSAY0335 | Hs00207926_m1 | SEC24D | SEC24 family, member | CAGCAAGCCAGCTTATTCTACCAGA |
| | | | D (S. cerevisiae) | |
| ASSAY0336 | Hs00208333_m1 | IQSEC1 | IQ motif and Sec7 | ACCTCCGAGGTGTGGACGATGGTGA |
| | | | domain 1 | |
| ASSAY0337 | Hs00208459_m1 | N4BP2L2 | NEDD4 binding protein | ATTGTCTCGAATTCTGCTTGGTCAG |
| | | | 2-like 2 | |
| ASSAY0340 | Hs00210194_m1 | SIPA1L1 | signal-induced | ACTAGAGAGGCGGCTGTCTCCTGGT |
| | | | proliferation- | |
| | | | associated 1 like 1 | |
| ASSAY0341 | Hs00210368_m1 | SH3YL1 | SH3 domain containing, | ATCATGAGAGAGTTGGCAATTTGAA |
| | | | Ysc84-like 1 | |
| | | | (S. cerevisiae) | |
| ASSAY0342 | Hs00210626_m1 | VILL | villin-like | GGAAGGTGGAGGTGTGGTGCATCCA |
| ASSAY0344 | Hs00211234_m1 | FAM164A | family with sequence | ACATAGCCAGGCCAGATGGGGACTG |
| | | | similarity 164, | |
| | | | member A | |
| ASSAY0345 | Hs00211349_m1 | TMED5 | transmembrane emp24 | ATCAGATGGAGTTCACACTGTAGAG |
| | | | protein transport | |
| | | | domain containing 5 | |
| ASSAY0348 | Hs00212451_m1 | CAB39 | calcium binding | GCTCATTGACTTTGAGGGCAAAAAA |
| | | | protein 39 | |
| ASSAY0351 | Hs00212862_m1 | ZC3HC1 | zinc finger, C3HC-type | CCATCCCCAGACCGATTTGGGATGT |
| | | | containing 1 | |
| ASSAY0354 | Hs00213209_m1 | ZDHHC3 | zinc finger, DHHC-type | TCGTCCTGTTTACAATGTACATAGC |
| | | | containing 3 | |
| ASSAY0355 | Hs00214019_m1 | SMG6 | Smg-6 homolog, | CCCCTCATCGTGATCAATGAGCTGG |
| | | | nonsense mediated | |
| | | | mRNA decay factor | |
| | | | (C. elegans) | |
| ASSAY0356 | Hs00214159_m1 | FAM46A | family with sequence | ACTCACGCTCAAGGAAGCTTATGTG |
| | | | similarity 46, member A | |
| ASSAY0357 | Hs00214281_m1 | AFTPH | aftiphilin | TATGCAGCAGGATTGGGTATGTTAG |
| ASSAY0362 | Hs00215155_m1 | MARCH5 | membrane-associated | CCAAAATTGGGTCCAGTGGTTTACG |
| | | | ring finger (C3HC4) 5 | |
| ASSAY0367 | Hs00215976_m1 | ARGLU1 | arginine and glutamate | AGCCAAACTGGCCGAAGAACAGTTG |
| | | | rich 1 | |
| ASSAY0374 | Hs00218284_m1 | TBC1D2 | TBC1 domain family, | CTTCTGACGAAGTGCGCCTACCTCC |
| | | | member 2 | |
| ASSAY0380 | Hs00609603_m1 | ACVR2B | activin A receptor, | ATTGCCCACAGGGACTTTAAAAGTA |
| | | | type IIB | |
| ASSAY0391 | Hs00272972_m1 | MYST2 | MYST histone | CCAGGCACCAGGCACCAACGGAGAG |
| | | | acetyltransferase 2 | |
| ASSAY0392 | Hs00287264_m1 | ACSS1 | acyl-CoA synthetase | TGGGGTCAGTGGGAGAGCCCATCAA |
| | | | short-chain family | |
| | | | member 1 | |
| ASSAY0393 | Hs00295454_s1 | N/A | N/A | AGCTAAGAGGTTTCCAGTGCAATAC |
| ASSAY0394 | Hs00325999_m1 | TET2 | tet oncogene family | GGCAGCACATTGGTATGCACTCTCA |
| | | | member 2 | |
| ASSAY0400 | Hs00379387_m1 | RAD54L2 | RAD54-like 2 | GGCTGCCTCAGGTTCCCAGGGACCT |
| | | | (S. cerevisiae) | |
| ASSAY0402 | Hs00390635_m1 | TNK | TRAF2 and NCK | ACCCATCAGAGCAAGCAACCCTGAT |
| | | | interacting kinase | |
| ASSAY0405 | Hs00415453_g1 | TRA@ | T cell receptor alpha | TGGATTCAGTTGGCATGGGTGAGCA |
| | | | locus | |
| ASSAY0407 | Hs00540709_s1 | TMEM203 | transmembrane | CGGGAGCTGGTGCAGTGGCTAGGCT |
| | | | protein 203 | |
| ASSAY0408 | Hs00559348_m1 | CR1 | complement component | TGTTCCTGCTGCCTGCCCACATCCA |
| | | | (3b/4b) receptor 1 | |
| | | | (Knops blood group) | |
| ASSAY0409 | Hs00606257_m1 | ATP6V1G1 | ATPase, H+ | CCCGCAAAAGAAAGAACCGGAGGCT |
| | | | transporting, lysosomal | |
| | | | 13 kDa, V1 subunit G1 | |
| ASSAY0420 | Hs00609515_m1 | CD247 | CD247 molecule | GCCTTTACCAGGGTCTCAGTACAGC |
| ASSAY0421 | Hs00609836_m1 | AARS | alanyl-tRNA synthetase | CAAAATTTGGGGCTGGATGACACCA |
| ASSAY0425 | Hs00610478_m1 | PWP2 | PWP2 periodic | GGCTGGCCAAGTACTTCTTCAATAA |
| | | | tryptophan protein | |
| | | | homolog (yeast) | |
| ASSAY0427 | Hs00610590_m1 | NEDD9 | neural precursor cell | GGAACATCATCAGCTGAGCCAGTTC |
| | | | expressed develop- | |
| | | | mentally down- | |
| | | | regulated 9 | |
| ASSAY0431 | Hs00612292_m1 | TRA@ | T cell receptor alpha | CTGTGTTTCTGACCTTTGGAACTAT |
| | | | locus | |
| ASSAY0433 | Hs00697331_m1 | YTHDF1 | YTH domain family, | TGGTGCGCAAGGAACGGCAGAGTCG |
| | | | member 1 | |
| ASSAY0435 | Hs00702769_s1 | MARCKSL1 | MARCKS-like 1 | GTCCCCCCCAAGGAGACCCCCAAGA |
| ASSAY0437 | Hs00705412_s1 | NFIL3 | nuclear factor, | ACTCTCCACAAAGCTCGCTGTCCGA |
| | | | interleukin 3 regulated | |
| ASSAY0440 | Hs00706419_s1 | SELT | selenoprotein T | ACATGATTGAGAACCAGTGTATGTC |
| ASSAY0441 | Hs00708570_s1 | PSENEN | presenilin enhancer 2 | TGGGGCCCTGCTTATTCTCCCAGGA |
| | | | homolog (C. elegans) | |
| ASSAY0442 | Hs00733884_m1 | U2AF1 | U2 small nuclear RNA | CTGACGGCTCACACTACCATTGCCC |
| | | | auxiliary factor 1 | |
| ASSAY0449 | Hs00741181_g1 | LAGE3 | L antigen family, | AGGATCCTGGTCGTCCGCTGGAAAG |
| | | | member 3 | |
| ASSAY0450 | Hs00743508_s1 | C18orf32 | chromosome 18 open | AGGTAGAATTTTGGGAGGTAATAAT |
| | | | reading frame 32 | |
| ASSAY0456 | Hs00750443_s1 | ARL8B | ADP-ribosylation | GTGTGACTCTGTGGGGACTGCATAG |
| | | | factor-like 8B | |
| ASSAY0460 | Hs00759012_s1 | MTRF1L | mitochondrial | CGGACTAAGGATGCGGTCCCGGGTT |
| | | | translational release | |
| | | | factor 1-like | |
| ASSAY0463 | Hs00762481_s1 | RPL36 | ribosomal protein L36 | CCTTCTCCCCGTCGCTGTCCGCAGC |
| ASSAY0472 | Hs00234637_m1 | NKTR | natural killer-tumor | AATCGGCGGTCCAGGAGTTGTAGAT |
| | | | recognition sequence | |
| ASSAY0480 | Hs00242160_m1 | HHEX | hematopoietically | ACCCCCTGGGCAAACCTCTACTCTG |
| | | | expressed homeobox | |
| ASSAY0484 | Hs00244740_m1 | CDC25B | cell division cycle 25 | GGCGGAGCAGACGTTTGAACAGGCC |
| | | | homolog B (S. pombe) | |
| ASSAY0489 | Hs00248408_m1 | Sep-06 | septin 6 | AGAAAGAGCTGCACGAGAAGTTTGA |
| ASSAY0501 | Hs00256990_m1 | CENPO | centromere protein O | CGGCGAGCCAGCGTGAAAGCATGTA |
| ASSAY0513 | Hs00260900_m1 | C5orf32 | chromosome 5 open | CAGGAGCCTCCTAAAACCACAGTGT |
| | | | reading frame 32 | |
| ASSAY0514 | Hs00261275_m1 | PGBD1 | piggyBac transposable | AGTCAGGTCCCAGACATTGGTGAAG |
| | | | element derived 1 | |
| ASSAY0517 | Hs00261978_m1 | PYROXD2 | pyridine nucleotide- | TGGTGGCTGCAGCGTACCTGCAGAG |
| | | | disulphide | |
| | | | oxireductase domain 2 | |
| ASSAY0526 | Hs00266011_m1 | DNAJA1 | DnaJ (Hsp40) | CTCAGCCCGCACCGGCAGTAGAAGA |
| | | | homolog, subfamily A, | |
| | | | member 1 | |
| ASSAY0527 | Hs00266036_m1 | EIF3E | eukaryotic translation | TTATCAGCCACAATATCTTAATGCA |
| | | | initiation factor 3, | |
| | | | subunit E | |
| ASSAY0535 | Hs00268342_m1 | SORL1 | sortilin-related | CAACAAGCGGTACATCTTTGCAGAC |
| | | | receptor, L(DLR class) | |
| | | | A repeats-containing | |
| ASSAY0537 | Hs00269247_s1 | GPR65 | G protein-coupled | TTCTCTCCTGCCTTGTGCAAAGGGA |
| | | | receptor 65 | |
| ASSAY0548 | Hs00273238_m1 | BACE2 | beta-site APP-cleaving | ACACTTGCCAAGCCATCAAGTTCTC |
| | | | enzyme 2 | |
| ASSAY0549 | Hs00273329_s1 | NAT6 | N-acetyltransferase 6 | CCGCACCTCCCGCCTGCACTCCCTG |
| | | | (GCN5-releated) | |
| ASSAY0550 | Hs00273392_s1 | LDOC1 | leucine zipper, down- | AACCCCAGCTATTGGCCAGGCCCCT |
| | | | regulated in cancer 1 | |
| ASSAY0553 | Hs00275656_m1 | GSK3B | glycogen synthase | AGAAATAATCAAGGTCCTGGGAACT |
| | | | kinase 3 beta | |
| ASSAY0555 | Hs00276784_m1 | N/A | N/A | N/A |
| ASSAY0558 | Hs00287906_s1 | H3F3B | H3 histone, family 3B | GCTGTATTTGCAGTGTGGGCTAAGA |
| | | | (H3.3B) | |
| ASSAY0559 | Hs00291515_m1 | IKBIP | IKBKB interacting | TAATTTCAGAAAAGCTTGAGTCTAC |
| | | | protein | |
| ASSAY0562 | Hs00292593_m1 | COMMD7 | COMM domain | GGGCGCGCAGCAGTTCTCAGCCCTG |
| | | | containing 7 | |
| ASSAY0569 | Hs00299171_m1 | CCDC127 | coiled-coil domain | TTGGCTGCTTTTCGTTGGATTTGGT |
| | | | containing 127 | |
| ASSAY0572 | Hs00300396_m1 | PELP1 | proline, glutamate and | TCTCTCAAAGGCAAGCTGGCCTCAT |
| | | | leucine rich protein 1 | |
| ASSAY0577 | Hs00328354_m1 | HUWE1 | HECT, UBA and WWE | GAAAAAGATCAGATGGGGAACAGGA |
| | | | domain containing 1 | |
| ASSAY0584 | Hs00356601_m1 | CCR2 | chemokine (C-C motif) | GCCACAAGCTGAACAGAGAAAGTGG |
| | | | receptor 2 | |
| ASSAY0588 | Hs00360923_g1 | CRELD2 | cysteine-rich with | TCCAAGTACGAGTCCAGCGAGATTC |
| | | | EGF-like domains 2 | |
| ASSAY0591 | Hs00361490_m1 | CNR2 | cannabinoid receptor 2 | ACAACACAACCCAAAGCCTTCTAGA |
| | | | (macrophage) | |
| ASSAY0597 | Hs00364835_m1 | LRG1 | leucine-rich alpha-2- | ACCAAAAAGCCCAGGGGGCATTCAA |
| | | | glycoprotein 1 | |
| ASSAY0598 | Hs00364877_m1 | NCRNA002 | non-protein coding | AAAGGTGACCTGAAGGATGTCCTTG |
| | | 19 | RNA 219 | |
| ASSAY0599 | Hs00365678_g1 | RAB24 | RAB24, member RAS | GTATTTGGGACACAGCAGGCTCTGA |
| | | | oncogene family | |
| ASSAY0608 | Hs00370691_m1 | FAM113B | family with sequence | TACTTTAATGACCATCCGCAGAGCC |
| | | | similarity 113, | |
| | | | member B | |
| ASSAY0614 | Hs00373045_m1 | GAB2 | GRB2-associated | GAGAGCACAGACTCCCTGAGAAATG |
| | | | binding protein 2 | |
| ASSAY0624 | Hs00377427_m1 | APBB1 | amyloid beta (A4) | TCCCCAGAGGACACAGATTCCTTCT |
| | | | precursor protein- | |
| | | | binding, family B, | |
| | | | member 1 (Fe65) | |
| ASSAY0637 | Hs00383718_m1 | C5AR1 | complement component | AGACCAGAACATGAACTCCTTCAAT |
| | | | 5a receptor 1 | |
| ASSAY0543 | Hs00386037_m1 | BOD1L | biorientation of | CAGAGGCTCAGAGATCAAAGACACA |
| | | | chromosomes in cell | |
| | | | division 1-like | |
| ASSAY0645 | Hs00387426_m1 | MAP2K4 | mitogen-activated | CAAATAATGGCAGTTAAAAGAATTC |
| | | | protein kinase kinase 4 | |
| ASSAY0651 | Hs00391737_m1 | SMG6 | Smg-6 homolog, nonsense | ACGCAAGACAGTAAAATATGCCTTG |
| | | | mediated mRNA decay | |
| | | | factor (C. elegans) | |
| ASSAY0653 | Hs00393297_m1 | ZNF512B | zinc finger protein | TGGTAAGAAAAGGGCTGCGGACAGC |
| | | | 512B | |
| ASSAY0655 | Hs00394683_m1 | LST1 | leukocyte specific | AGGCCACAAGCTCTGGATGAGGAAC |
| | | | transcript 1 | |
| ASSAY0656 | Hs00395045_m1 | STMN3 | stathmin-like 3 | CCAGTACGGGGACATGGAGGTGAAG |
| ASSAY0661 | Hs00405469_m1 | JMJD1C | jumonji domain | TCAAAAGCAGGAATTCTCAAGAAAT |
| | | | containing 1C | |
| ASSAY0664 | Hs00405872_m1 | CYTSA | cytospin A | GTGCAGCGCGTGTTCTTGGGGAAGA |
| ASSAY0668 | Hs00411197_m1 | LRRK2 | leucine-rich repeat | GACAAGAACAAGCCAACTGTTTTCT |
| | | | kinase 2 | |
| ASSAY0670 | Hs00411807_m1 | PHRF1 | PHD and ring finger | GTGCAGAAGATCTGCCACAGCAAGA |
| | | | domains 1 | |
| ASSAY0671 | Hs00412084_m1 | RFTN1 | raftlin, lipid raft | CCGACAGATCTCAGAAAACTGATCT |
| | | | linker 1 | |
| ASSAY0674 | Hs00414236_m1 | GLTSCR2 | glioma tumor | CGCACGAGCGGTGGCTTGTTGTCAG |
| | | | suppressor candidate | |
| | | | region gene 2 | |
| ASSAY0677 | Hs00414889_m1 | ANKRD36B | ankyrin repeat domian | GAAGGAAAGGACTGCCCTACATTTG |
| | | | 36B | |
| ASSAY0682 | Hs00416940_m1 | INSC | inscuteable homolog | TGGCCTGCCTGGCTGCTCTGCGTAG |
| | | | (Drosophila) | |
| ASSAY0683 | Hs00417251_m1 | SNHG6 | small nucleolar RNA | TAGCTGGGCTCTGCGAGGTGCAAGA |
| | | | host gene 6 (non- | |
| | | | protein coding) | |
| ASSAY0684 | Hs00417273_m1 | LRRK2 | leucine-rich repeat | TTTGGCCCTCCTCACTGAGACTATT |
| | | | kinase 2 | |
| ASSAY0691 | Hs00420179_m1 | FAM159A | family with sequence | ACAGACAGCAGGCCCTGAGGAGGTT |
| | | | similarity 159, | |
| | | | member A | |
| ASSAY0692 | Hs00426231_m1 | LYZ | lysozyme (renal | TATCCTGCAGTGCTTTGCTGCAAGA |
| | | | amyloidosis) | |
| ASSAY0693 | Hs00427259_m1 | PPP2CA | protein phosphatase 2, | GAAGTTCCCCATGAGGGTCCAATGT |
| | | | catalytic subunit, | |
| | | | alpha isozyme | |
| ASSAY0695 | Hs00427795_g1 | TNFRSF10 | tumor necrosis factor | CGGAAGTGTAGCAGGTGCCCTAGTG |
| | | C | receptor superfamily, | |
| | | | member 10c, decoy | |
| | | | without an intra- | |
| | | | cellular domain | |
| ASSAY0699 | Hs00429452_m1 | VPREB3 | pre-B lymphocyte 3 | CCTTCCTGTCAGTTTCCCAGACAGT |
| ASSAY0702 | Hs00429977_m1 | SHISA5 | shisa homolog 5 | CCGGGTGCACGTGGTGAGGTGTGTA |
| | | | (Xenopus laevis) | |
| ASSAY0706 | Hs00431040_g1 | SIRPG | signal-regulatory | CAGAAGACCTGACTCTCCTTCCTTC |
| | | | protein gamma | |
| ASSAY0709 | Hs00536594_m1 | MTG1 | mitochondrial GTPase | CAGCGCTTTGGGTACGTGCAGCACT |
| | | | 1 homolog | |
| | | | (S. cerevisiae) | |
| ASSAY0713 | Hs00538077_m1 | C5orf41 | chromosome 5 open | ACACCCACAGACAGCATCGCACAGA |
| | | | reading frame 41 | |
| ASSAY0720 | Hs00540812_m1 | CCDC101 | coiled-coil domain | AGAGGCTGAGTGCAACATCCTTCGG |
| | | | containing 101 | |
| ASSAY0734 | Hs00602957_m1 | HN1 | hematological and | CCAAGTCAGCAGGTGCCAAGTCTAG |
| | | | neurological | |
| | | | expressed 1 | |
| ASSAY0741 | Hs00606874_g1 | TNFRSF13 | tumor necrosis factor | CGGAGACAAGGACGCCCCAGAGCCC |
| | | C | receptor superfamily, | |
| | | | member 13C | |
| ASSAY0745 | Hs00826823_m1 | SFI1 | Sfi1 homolog, spindle | GCAGAACCTCTGGTCCTGTCGGCGG |
| | | | assembly associated | |
| | | | (yeast) | |
| ASSAY0750 | Hs00846452_s1 | RNF208 | ring finger protein 208 | CCACGTGCGGAACCCACTGTCCGCC |
| ASSAY0751 | Hs00852410_g1 | PRKRIR | protein-kinase, | TACTCTGCAGTGCAGTGTCAGATTT |
| | | | interferon-inducible | |
| | | | double stranded RNA | |
| | | | dependent inhibitor, | |
| | | | repressor of (P58 | |
| | | | repressor) | |
| ASSAY0752 | Hs00854645_g1 | BRI3 | brain protein I3 | CCTTCCTGGGCATCTTCCTGGCCAT |
| ASSAY0754 | Hs00867656_g1 | DLEU2 | deleted in lymphocytic | AAAAATTTATTTTACACATGTCAAG |
| | | | leukemia 2 (non- | |
| | | | protein coding) | |
| ASSAY0755 | Hs00891617_s1 | N/A | N/A | ACAGTTGTTTATGGTAGGAGGACTA |
| ASSAY0758 | Hs00898410_g1 | RPL32P3 | ribosomal protein L32 | GCTGGCAGGCACCATGTCGTCCTGT |
| | | | pseudogene 3 | |
| ASSAY0759 | Hs00900829_g1 | IL23A | interleukin 23, alpha | CCTCAGCCAACTCCTGCAGCCTGAG |
| | | | subunit p19 | |
| ASSAY0762 | Hs00902624_m1 | MED6 | mediator complex | AGAAAAGCCTGTTCCAGTGGATCAA |
| | | | subunit 6 | |
| ASSAY0763 | Hs00907493_m1 | TRA2B | transformer 2 beta | ATCAGATTTATAGAAGGCGGTCACC |
| | | | homolog (Drosophila) | |
| ASSAY0766 | Hs00918972_m1 | TCF12 | transcription factor 12 | AACATCAGCCAGTTCCAGAGTTATC |
| ASSAY0767 | Hs00921653_m1 | RBM19 | RNA binding motif | CCGCTCACTTTCACGAGCCCCCGAA |
| | | | protein 19 | |
| ASSAY0773 | Hs00932180_g1 | RPS5 | ribosomal protein S5 | TGACATTTCCCTGCAGGATTACATT |
| ASSAY0774 | Hs00935093_m1 | SYNJ2BP | synaptojanin 2 binding | AGCACAGGTTACAGGTGCAGAATGG |
| | | | protein | |
| ASSAY0778 | Hs00939205_m1 | RNF24 | ring finger protein 24 | GCCTTCCACAGAAAGTGCCTTATTA |
| ASSAY0782 | Hs00945401_m1 | ANXA1 | annexin A1 | TGCCAAGCCATCCTGGATGAAACCA |
| ASSAY0784 | Hs00949382_m1 | ST6GAL1 | ST6 beta- | CCAAAGTGGTACCAGAATCCGGATT |
| | | | galactosamide alpha- | |
| | | | 2,6-sialytransferase 1 | |
| ASSAY0790 | Hs00963390_g1 | CCT8 | chaperonin containing | GTGGTTTTTAAGCATGAAAAGGAAG |
| | | | TCP1, subunit 8 (theta) | |
| ASSAY0792 | Hs00967069_m1 | DNAJC13 | DnaJ (Hsp40) homolog, | AGCAGGATACCTCACAGGACCTGGA |
| | | | subfamily C, member 13 | |
| ASSAY0793 | Hs00967250_m1 | BRP44 | brain protein 44 | AGCTTTTTCGTATTTGGAGATATAA |
| ASSAY0794 | Hs00970533_g1 | SUB1 | SUB1 homolog | GTTGACAAAAAGTTAAAGAGGAAAA |
| | | | (S. cerevisiae) | |
| ASSAY0795 | Hs00971411_m1 | ANXA3 | annexin A3 | TTACTGTTGGCCATAGTTAATTGTG |
| ASSAY0801 | Hs00985988_g1 | CROCC | ciliary rootlet coiled- | CCGCCAGAGGGTGTCCACACTGAAG |
| | | | coil, rootletin | |
| ASSAY0806 | Hs00997789_m1 | PSEN1 | presenilin 1 | TTCATTTACTTGGGGGAAGTGTTTA |
| ASSAY0809 | Hs01003603_m1 | CISH | cytokine inducible | TGCGTTCAGGGACCTCGTCCTTTGC |
| | | | SH2-containing protein | |
| ASSAY0811 | Hs01008103_m1 | DAK | dihydroxyacetone | AGCCGTGCGGCCAGAGCAATCCAGG |
| | | | kinase 2 homolog | |
| | | | (S. cerevisiae) | |
| ASSAY0820 | Hs01031740_m1 | ARPC2 | actin related protein | TGAAAACAATCACGGGGAAGACGTT |
| | | | 2/3 complex, subunit 2, | |
| | | | 34 kDa | |
| ASSAY0821 | Hs01032565_m1 | ST6GALNA | ST6 (alpha-N-acetyl- | CCTGTGACCAGGTCAGTGCCTATGG |
| | | C2 | neuraminyl-2,3-beta- | |
| | | | galactosyl-1,3)-N- | |
| | | | acetylgalactosaminide | |
| | | | alpha-2,6- | |
| | | | sialyltransferase 2 | |
| ASSAY0822 | Hs01032700_m1 | LBR | lamin B receptor | TTATTGTTCTGAAACTTTGTGGTTA |
| ASSAY0826 | Hs01036536_m1 | BCR | breakpoint cluster | ATTGCTGTGGTCACCAAGAGAGAGA |
| | | | region | |
| ASSAY0833 | Hs01051024_g1 | SETDB1 | SET domain, | TCCCAACCCTTCTTGAACTGGGTCT |
| | | | bifurcated 1 | |
| ASSAY0835 | Hs01053640_m1 | TXK | TXK tyrosine kinase | GCTGGCATGAGAAACCTGAAGGCCG |
| ASSAY0838 | Hs01056146_m1 | DDX21 | DEAD (Asp-Glu-Ala-Asp) | AACAGAAATACAGGAGAAATGGCAT |
| | | | box polypeptide 21 | |
| ASSAY0842 | Hs01062739_m1 | TMX4 | thioredoxin-related | TCTGAGCGTTCTGAGCAGAATCGGA |
| | | | transmembrane protein 4 | |
| ASSAY0843 | Hs01064052_g1 | SEPX1 | selenoprotein X, 1 | TTGTCCCTAAAGGCAAAGAAACTTC |
| ASSAY0853 | Hs01075667_m1 | IL6R | interleukin 6 receptor | GCACGCCTTGGACAGAATCCAGGAG |
| ASSAY0859 | Hs01090047_m1 | PRKCD | protein kinase C, delta | AGGACATCCTGGAGAAGCTCTTTGA |
| ASSAY0862 | Hs01095303_m1 | RALB | v-ral simian leukemia | AACGTGGACAAGGTGTTCTTTGACC |
| | | | viral oncogene homolog | |
| | | | B (ras related; GTP | |
| | | | binding protein) | |
| ASSAY0863 | Hs01102345_m1 | RPL37A | ribosomal protein L37a | GCGGTGCCTGGACGTACAATACCAC |
| ASSAY0867 | Hs01110945_m1 | ADA | adenosine deaminase | GTTTAAAAGGCTGAACATCAATGCG |
| ASSAY0876 | Hs01372307_m1 | ZDHHC18 | zinc finger, DHHC-type | ACCTCCCAGCCTAATTGACCGGAGG |
| | | | containing 18 | |
| ASSAY0879 | Hs01395179_m1 | LOC10013 | hypothetical protein | CTCAGATTTTGAGCAAACAAAGCTC |
| | | 1564 | LOC100131564 | |
| ASSAY0883 | Hs01553131_m1 | FNBP4 | formin binding | TGGTTAGTGGCATGGCAGAGAGAAA |
| | | | protein 4 | |
| ASSAY0886 | Hs01564142_m1 | GLIPR1 | GLI pathogenesis- | CTATACATGACTTGGGACCCAGCAC |
| | | | related 1 | |
| ASSAY0897 | Hs01595350_m1 | DTX3 | deltex homolog 3 | CCGGTGTCCAGGGGGCTGAACACCC |
| | | | (Drosophila) | |
| ASSAY0904 | Hs01885851_s1 | LTB4R2 | leukotriene B4 | CTACGGCCTTGGCCTTCTTCAGTTC |
| | | | receptor 2 | |
| ASSAY0907 | Hs01908739_s1 | SLC25A45 | solute carrier family | CAAAGGAGGTGGTGTCTGTCAGTCA |
| | | | 25, member 45 | |
| ASSAY0911 | Hs01926559_g1 | RPL13A | ribosomal protein L13a | CTGGGAAGATGCACAACCAAGGGGT |
| ASSAY0913 | Hs01945436_u1 | RPS13 | ribosomal protein S13 | GTCCTCCCTCCCAATTGGAAATATG |
| ASSAY0914 | Hs02339116_s1 | OR52K1 | olfactory receptor, | GGCAGTTCTCCAGCTTGCCTCTCAG |
| | | | family 52, subfamily K, | |
| | | | member 1 | |
| ASSAY0919 | Hs02510591_s1 | DPYD | dihydropyrimidine | GATGGGTGTACAAACTCATCCTCTT |
| | | | dehydrogenase | |
| ASSAY0922 | Hs02597217_g1 | GNG10; | guanine nucleotide | GAGAGGATCAAGGTCTCTCAGGCAG |
| | | LOC65350 | binding protein (G | |
| | | 3 | protein), gamma 10; | |
| | | | GNG10 pseudogene | |
| ASSAY0931 | Hs99999003_m1 | MYC | v-myc | GGAGACACCGCCCACCACCAGCAGC |
| | | | myelocytomatosis viral | |
| | | | ongogene homolog | |
| | | | (avian) | |
| ASSAY0935 | Hs00991010_m1 | IL1R1 | interleukin 1 receptor, | TATTACAGTGTGGAAAATCCTGCAA |
| | | | type I | |
| ASSAY0939 | Hs00999731_g1 | PICALM | phosphatidylinositol | AAATGGAACCACTAAGAATGATGTA |
| | | | binding clathrin | |
| | | | assembly protein | |
| ASSAY0944 | Hs01587378_mH | TOMM40 | translocase of outer | CCCACAGAGGCGTTCCCTGTACTGG |
| | | | mitochondrial membrane | |
| | | | 40 homolog (yeast) | |
| ASSAY0947 | Hs00254569_s1 | HRH2 | histamine receptor H2 | GGTCACCCCAGTTCGGGTCGCCATC |
| ASSAY0948 | Hs00203146_m1 | C11orf2 | chromosome 11 open | ATCTCAGCCACAGACACCATCCGGA |
| | | | reading frame 2 | |
| ASSAY0950 | Hs01123468_m1 | DIDO1 | death inducer- | ATGCGGTGCTCAGGCAGGTATTAAA |
| | | | obliterator 1 | |
| ASSAY0957 | Hs00536435_m1 | NLRP12 | NLR family, pyrin | ACTACGGACTTTGTGGCTGAAGATC |
| | | | domain containing 12 | |
| ASSAY0959 | Hs00185574_m1 | EZR | ezrin | AAAATGCCGAAACCAATCAATGTCC |
| ASSAY0962 | Hs00211306_m1 | DHRS7 | dehydrogenase/reductase | CTTTAAGAGTGGTGTGGATGCAGAC |
| | | | (SDR family) member 7 | |
| ASSAY0964 | Hs00375656_m1 | MRPL38 | mitochondrial | ATTTCGGGGAGAAGACAGATCCCAA |
| | | | ribosomal protein L38 | |
| ASSAY0966 | Hs00323799_m1 | RNF160 | ring finger protein 160 | TGAAAAGGCATGTCCTAGTTCAGAT |
| ASSAY0968 | Hs00209150_m1 | EPN2 | epsin 2 | AAAACAGCCGAATCTGTGACCTCTC |
| ASSAY0969 | Hs00948075_m1 | HUWE1 | HECT, UBA and WWE | TCAATTGGCCAAGGTATTTCCCAGC |
| | | | domain containing 1 | |
| ASSAY0971 | Hs00391048_m1 | MEGF9 | multiple EGF-like | GTGCAACAGTTCTGGGAAATGCCAG |
| | | | domains 9 | |
| ASSAY0978 | Hs00830212_s1 | CALM2 | calmodulin 2 | GTTTAGCCACTTAAAATCTGCTTAT |
| | | | (phosphorylase kinase, | |
| | | | delta) | |
| ASSAY0990 | Hs00225286_m1 | ZNF655; | zinc finger protein | CCCCTCCCCTCGTGATGGTCATTGT |
| | | NUDCD3 | 655; NudC domain | |
| | | | containing 3 | |
| ASSAY0994 | Hs00219784_m1 | EIF4ENIF1 | eukaryotic translation | TCAGAAACAGGCAACAGCGAGTGAC |
| | | | initiation factor 4E | |
| | | | nuclear import factor 1 | |
| ASSAY1006 | Hs00228595_m1 | GON4L | gon-4-like (C. elegans) | GATGTGGGGAATGAAGATGAAGCAG |
| ASSAY1022 | Hs00183764_m1 | PRDM4 | PR domain containing 4 | TCCCTGCCCCAGGCCTCCCAGTGGC |
| ASSAY1023 | Hs01573555_m1 | ITPR3 | inositol 1,4,5- | GCTTCATCTGTGGTCTGGAGAGGGA |
| | | | triphosphate receptor, | |
| | | | type 3 | |
| ASSAY1024 | Hs00918650_m1 | CSDE1 | cold shock domain | TAAAAGTAGGAGATGATGTTGAATT |
| | | | containing E1, RNA- | |
| | | | binding | |
| ASSAY1025 | Hs00182082_m1 | MYD88 | myeloid differentiation | CCCAGCATTGAGGAGGATTGCCAAA |
| | | | primary response gene | |
| | | | (88) | |
| ASSAY1026 | Hs00162271_m1 | SPTBN1 | spectrin, beta, non- | GCTCTGGGCACACAGGTGAGGCAGC |
| | | | erythrocytic 1 | |
| ASSAY1029 | Hs00203675_m1 | C16orf5 | chromosome 16 open | TGCCTCCGGGTTTCTACCCTCCTCC |
| | | | reading frame 5 | |
| ASSAY1036 | Hs00218198_m1 | DCP1A | DCP1 decapping | CCATCCCGGTTGCAGGCGCCCCACT |
| | | | enzyme homolog A | |
| | | | (S. cerevisiae) | |
| ASSAY1039 | Hs00425763_m1 | TAF6 | TAF6 RNA polymerase | GAGCCTCCTGCTGAAACACTGTGCT |
| | | | II, TATA box binding | |
| | | | protein (TBP)- | |
| | | | associated factor, | |
| | | | 80 kDa | |
| ASSAY1045 | Hs00399261_m1 | RPRD2 | regulation of nuclear | GGCTCCGGAGATCTGCATATCCCCA |
| | | | pre-mRNA domain | |
| | | | containing 2 | |
| ASSAY1046 | Hs00388156_m1 | CHID1 | chitinase domain | GTTGTCGGGGCCAGGTACATCCAGA |
| | | | containing 1 | |
| ASSAY1052 | Hs00391528_m1 | ANKRD17 | ankyrin repeat | ACTAGAAGCTGCAGGAATAGGAAAA |
| | | | domain 17 | |
| ASSAY1053 | Hs00984230_m1 | B2M | beta-2-microglobulin | AAGCAGCATCATGGAGGTTTGAAGA |
| ASSAY1057 | Hs00200632_m1 | SYNRG | snergin, gamma | CCCAAGAAACCAGGCCCTTCCTTGG |
| ASSAY1059 | Hs00195059_m1 | SORBS3 | sorbin and SH3 | ATGGCTGGTTTGTGGGTGTCTCCCG |
| | | | domain containing 3 | |
| ASSAY0161 | Hs00330542_m1 | TPCN1 | two pore segment | TACCTCCAGGAAGGCGAGAACAACG |
| | | | channel 1 | |
| ASSAY1063 | Hs00418559_m1 | POGZ | pogo transposable | CAACAATGCTGGCAATCCTTTGGTC |
| | | | element with ZNF domain | |
| ASSAY1074 | Hs00386697_m1 | IL2RB | interleukin 2 receptor, | GAACACCGGGCCATGGCTGAAGAAG |
| | | | beta | |
| ASSAY1078 | Hs00229975_m1 | HUWE1 | HECT, UBA and WWE | TGAGAATGACAGGAGCCATCCGCAA |
| | | | domain containing 1 | |
| ASSAY1082 | Hs02559508_s1 | SMARCC1 | SWI/SNF releated, | GGGAGGGAGTTTGGCAAGAATGGAG |
| | | | matrix associated, | |
| | | | actin dependent | |
| | | | regulator or chromatin, | |
| | | | subfamily c, member 1 | |
| ASSAY1084 | Hs00390223_m1 | UBR4 | ubiquitin protein | ACATGACCACAGGTACAGAATCAGA |
| | | | ligase E3 component n- | |
| | | | recognin 4 | |
| ASSAY1088 | Hs00374213_m1 | GLUL | glutamate-ammonia | TTTCTGTGGCTGGGAACACCTTCCA |
| | | | ligase (glutamine | |
| | | | synthetase) | |
| ASSAY1090 | Hs00202989_m1 | STK39 | serine threonine | GAGGTTATCGGCAGTGGAGCTACTG |
| | | | kinase 39 (STE20/SPS1 | |
| | | | homolog, yeast) | |
| ASSAY1093 | Hs00226352_m1 | ZCCHC6 | zinc finger, CCHC | AAAGGCTCTTCAGGTAGCCTTTCCA |
| | | | domain containing 6 | |
| ASSAY1094 | Hs00289449_m1 | SFI1 | Sfi1 homolog, spindle | GCAGAATGAGATGGCTGAGCGATTC |
| | | | assembly associated | |
| | | | (yeast) | |
| ASSAY1096 | Hs00323180_m1 | ZNF862 | zinc finger protein 862 | TGGCATCCTTGGGACCTGCTGCTGC |
| ASSAY1097 | Hs00704884_s1 | C5AR1 | complement component | TATTTATTTTATGGCAAGTTGGAAA |
| | | | 5a receptor 1 | |
| ASSAY1101 | Hs00536591_g1 | MTG1 | mitochondrial GTPase 1 | CCGAAAAGAGAACCTGGAGTACTGT |
| | | | homolog (S. cerevisiae) | |
| ASSAY1102 | Hs00415445_m1 | RNF216L; | ring finger protein | GAGTGGCGACTCTTTTGAAACAGAT |
| | | RNF216 | 216-like; ring finger | |
| | | | protein 216 | |

TABLE 6
Informative probes for MCI versus non-MCI

| Sequence No. | TaqMan | Gene | | Context Sequence |
|---|---|---|---|---|
| (DiaGenic probe ID) | Assay ID | Symbol | Gene name | (Oligonucleotide Sequence) |
| ASSAY0011 | Hs99999905_m1 | GAPDH | glyceraldehyde-3- | GGGCGCCTGGTCACCAGGGCTGCTT |
| | | | phosphate | |
| | | | dehydrogenase | |
| ASSAY0012 | Hs00158122_m1 | ISG20 | interferon stimulated | GCATCCAGAACAGCCTGCTTGGACA |
| | | | exonuclease gene 20 kDa | |
| ASSAY0014 | Hs00171131_m1 | SCYE1 | small inducible | GATGCTTTCCCAGGAGAGCCTGACA |
| | | | cytokine subfamily E, | |
| | | | member 1 (endothelial | |
| | | | monocyte-activating) | |
| ASSAY0020 | Hs00190266_m1 | STX4 | syntaxin 4 | AGTGGAGATGCAGGGGGAGATGATC |
| ASSAY0022 | Hs00190463_m1 | C21orf33 | chromosome 21 open | GGGAAGCCCATCGGCTTGTGCTGCA |
| | | | reading frame 33 | |
| ASSAY0032* | Hs00200394_m1 | RASSF1 | Ras association | GAGGTGAACTGGGACGCCTTCAGCA |
| | | | (RalGDS/AF-6) domain | |
| | | | family member 1 | |
| ASSAY0047* | Hs00220301_m1 | PPAN; | peter pan homolog | ATCAACGTGCACAAGGTGAACCTGA |
| | | PPAN- | (Drosophila); PPAN- | |
| | | P2RY11 | P2RY11 readthrough | |
| ASSAY0051 | Hs00220527_m1 | C1orf128 | chromosome 1 open | CCCTCTGAGATGAGACTGTACAAGA |
| | | | reading frame 128 | |
| ASSAY0054 | Hs00221227_m1 | PLEKHA4 | pleckstrin homology | TCTCCCCAGGACAGAGTGTCTGCTC |
| | | | domain containing, | |
| | | | family A | |
| | | | (phosphoinositide | |
| | | | binding specific) | |
| | | | member 4 | |
| ASSAY0057 | Hs00221859_m1 | SQRDL | sulfide quinone | GTTGAGCCCAGTGAGAGACATTTCT |
| | | | reductase-like (yeast) | |
| ASSAY0070* | Hs00225747_m1 | NOTCH2 | Notch homolog 2 | GTGCCTTTACTGGCCGGCACTGTGA |
| | | | (Drosophila) | |
| ASSAY0072 | Hs00225928_m1 | C2orf47 | chromosome 2 open | AGGGAGCGAAGCAGGCTTTTGCTCA |
| | | | reading frame 47 | |
| ASSAY0082* | Hs00228787_m1 | COASY | Coenzyme A synthase | AAAGATCTGTTGAAGAGCAAGTTGC |
| ASSAY0089 | Hs00231324_m1 | SMARCA4 | SWI/SNF releated, | GAATCCTCACCAGGACCTGCAAGCG |
| | | | matrix associated, | |
| | | | actin dependent | |
| | | | regulator of chromatin, | |
| | | | subfamily a, member 4 | |
| ASSAY0093* | Hs00233856_m1 | LRP1 | low density lipoprotein | CCCCTGAGATTTGTCCACAGAGTAA |
| | | | receptor-related | |
| | | | protein 1 | |
| ASSAY0096* | Hs00234224_m1 | ADAM17 | ADAM metallopeptidase | GGTGTCCAGTGCAGTGACAGGAACA |
| | | | domain 17 | |
| ASSAY0110* | Hs00157194_m1 | CTSB | cathepsin B | AAGCCACCCCAGAGAGTTATGTTTA |
| ASSAY0113* | Hs00157831_m1 | GTF2E2 | general transcription | GCCCTTCTCACTCAGCATTATGGAT |
| | | | factor IIE, polypeptide | |
| | | | 2, beta 34 kDa | |
| ASSAY0114* | Hs00157950_m1 | HLA-DOB | major histocompat- | ACAGACTCTCCAGAAGATTTTGTGA |
| | | | ibility complex, | |
| | | | class II, DO beta | |
| ASSAY0123 | Hs00160216_m1 | EXOSC10 | exosome component 10 | GTTGCTTCAGTGCATGAGCAGAGTA |
| ASSAY0126 | Hs00162077_m1 | SOAT1 | sterol O- | CCATCTTGCCAGGTGTGCTGATTCT |
| | | | acyltransferase 1 | |
| ASSAY0128 | Hs00163761_m1 | BTK | Bruton | GTCAGGACTGAGCACACAGGTGAAC |
| | | | agammaglobulinemia | |
| | | | tyrosine kinase | |
| ASSAY0132 | Hs00166580_m1 | UBE3A | ubiquitin protein | CTAGCCGAATGAAGCGAGCAGCTGC |
| | | | ligase E3A | |
| ASSAY0135 | Hs00170192_m1 | PNN | pinin, desmosome | GGCAGTCAGTAGGCTGGGCGGGGAG |
| | | | associated protein | |
| ASSAY0137* | Hs99999908_m1 | GUSB | glucuronidase, beta | TGAACAGTCACCGACGAGAGTGCTG |
| ASSAY0139 | Hs00173091_m1 | HMG20B | high-mobility group 20B | GAAAAGCAGCGGTACCTGGATGAGG |
| ASSAY0140 | Hs00173196_m1 | ZNF146 | zinc finger protein 146 | AGGATCTGCGCGGAAGAAGCCTGAG |
| ASSAY0144 | Hs00174143_m1 | IFNG | interferon, gamma | AAGAAATATTTTAATGCAGGTCATT |
| ASSAY0148* | Hs00174575_m1 | CCL5 | chemokine (C-C motif) | CAACCCAGCAGTCGTCTTTGTCACC |
| | | | ligand 5 | |
| ASSAY0161 | Hs00176998_m1 | PRKCB | protein kinase C, beta | GGCAGAAATTTGAGAGGGCCAAGAT |
| ASSAY0163 | Hs00177066_m1 | MAPK1 | mitogen-activated | CGGCATGGTGTGCTCTGCTTATGAT |
| | | | protein kinase 1 | |
| ASSAY0178 | Hs00186661_m1 | NCOA1 | nuclear receptor | CACCTCAGCCACCCCTGAATGCTCA |
| | | | coactivator 1 | |
| ASSAY0179 | Hs00187510_m1 | RAB7L1 | RAB7, member RAS | CGGTGGGAGTGGATTTTGCTCTGAA |
| | | | oncogene family-like 1 | |
| ASSAY0181 | Hs00188259_m1 | WARS | tryptophanyl-tRNA | AACCAAGGTCAATAAGCATGCGTTT |
| | | | synthetase | |
| ASSAY0182* | Hs00188433_m1 | FIBP | fibroblast growth | TGACCGGTTGGCCAGGGACTATGCA |
| | | | factor (acidic) intra- | |
| | | | cellular binding | |
| | | | protein | |
| ASSAY0184* | Hs00189461_m1 | BPTF | bromodomain PHD | AGCAGCACTCCAGGTAGGCGAAAAC |
| | | | finger transcription | |
| | | | factor | |
| ASSAY0190* | Hs00154457_m1 | CIRBP | cold inducible RNA | GCCCGACTCAGTGGCCGCCATGGCA |
| | | | binding protein | |
| ASSAY0193 | Hs00162605_m1 | TCEB3 | transcription | TAGACATTCTTGCGGAGACTGGGGT |
| | | | elongation factor B | |
| | | | (SIII), polypeptide 3 | |
| | | | (110kDa, elongin A) | |
| ASSAY0202 | Hs00182698_m1 | SKAP2 | src kinase associated | CCTCTGATGGAGCCCAGTTTCCTCC |
| | | | phosphoprotein 2 | |
| ASSAY0203 | Hs00183479_m1 | PDE4A | phosphodiesterase 4A, | CCTGGCCCAAGAACTGGAGAACCTG |
| | | | cAMP-specific | |
| | | | (phosphodiesterase E2 | |
| | | | dunce homolog, | |
| | | | Drosophila) | |
| ASSAY0206 | Hs00195897_m1 | UBE4B | ubiquitination factor | AAATACCCCCTCATGGCACTAGGTG |
| | | | E4B (UFD2 homolog, | |
| | | | yeast) | |
| ASSAY0207* | Hs00196206_m1 | GZMA | granzyme A (granzyme | CCTGCTAATTCCTGAAGATGTCTGT |
| | | | 1, cytotoxic T- | |
| | | | lymphocyte-associated | |
| | | | serine esterase 3) | |
| ASSAY0209 | Hs00200082_m1 | UBL3 | ubiquitin-like 3 | CAATTGGCCAATGGACTGGGAAGAA |
| ASSAY0211 | Hs00203341_m1 | CNOT4 | CCR4-NOT | GATAATTCCCAGCAGATATCTAACA |
| | | | transcription complex, | |
| | | | subunit 4 | |
| ASSAY0212 | Hs00204260_m1 | C11orf21 | chromosome 11 open | GAGGAGGAGCGCTGTGCCCAGGTGG |
| | | | reading frame 21 | |
| ASSAY0216 | Hs00209573_m1 | KIF13B | kinesin family member | TGCCAACAGGAAGCGAGGCTCTCTT |
| | | | 13B | |
| ASSAY0217 | Hs00211141_m1 | SIDT2 | SID1 transmembrane | GACCCGCAACAGGACAGAGGGCGTG |
| | | | family, member 2 | |
| ASSAY0223* | Hs00215938_m1 | RNF31 | ring finger protein 31 | TGCCCCACAACCGGATGCAGGCCCT |
| ASSAY0227 | Hs00222984_m1 | HPS4 | Hermansky-Pudlak | CATAGAGGAAGTGTACCACAGCAGC |
| | | | syndrome 4 | |
| ASSAY0228* | Hs00227687_m1 | DENND2D | DENN/MADD domain | TGGAAGAGGTCCTGCTGGTCAATCT |
| | | | containing 2D | |
| ASSAY0230* | Hs00228829_m1 | TNKS2 | tankyrase, TRF1- | TGAAACAGCATTGCATTGTGCTGCT |
| | | | interacting ankyrin- | |
| | | | related ADP-ribose | |
| | | | polymerase 2 | |
| ASSAY0236 | Hs00266763_m1 | GSPT1 | G1 to S phase | CCGTGCGGCACCTGTGGAATCCTCT |
| | | | transition 1 | |
| ASSAY0242 | Hs00276830_m1 | RUNDC2A | RUN domain | CAGTGAAACAGTGCCAGATCCGCTT |
| | | | containing 2A | |
| ASSAY0244* | Hs00295675_m1 | NGDN | neuroguidin, EIF4E | CTACAGAAAAGGGTCTCAGCTTCTT |
| | | | binding protein | |
| ASSAY0253 | Hs00374428_m1 | DNAJC25- | DNAJC25-GNG10 | TACGAGACACTCAAGGTCTCTCAGG |
| | | GNG10 | readthrough | |
| ASSAY0255 | Hs00382970_m1 | PFDN5 | prefoldin subunit 5 | ATGAAACAGGCCGTCATGGAAATGA |
| ASSAY0257 | Hs00397335_m1 | DNAJC13 | DnaJ (Hsp40) homolog, | GGTCCAAAGGTTCGAATTACGTTAA |
| | | | subfamily C, member 13 | |
| ASSAY0261* | Hs00429212_m1 | C16orf35 | chromosome 16 open | GCTGTGCAGGAGACCCAGCTCATCC |
| | | | reading frame 35 | |
| ASSAY0263* | Hs00606262_g1 | HDAC1 | histone deacetylase 1 | AGGAGAAGAAAGAAGTCACCGAAGA |
| ASSAY0264 | Hs00606522_m1 | TARDBP | TAR DNA binding | GAGAAGTTCTTATGGTGCAGGTCAA |
| | | | protein | |
| ASSAY0266 | Hs00607689_m1 | FAM103A1 | family with sequence | AGGCAATCGGTTGCAAGACAACAGA |
| | | | similarity 103, | |
| | | | member A1 | |
| ASSAY0267 | Hs00609831_g1 | AARS | alanyl-tRNA synthetase | CGGCGCCTCAGCCAAGGCCCTGAAT |
| ASSAY0278 | Hs01092416_s1 | N/A | N/A | GTGTGAAGATCCAGCCTGATGCCCA |
| ASSAY0282* | Hs00192572_m1 | SEL1L | sel-1 suppressor of | CGGGAAACAAACATTCGAGATATGT |
| | | | lin-12-like | |
| | | | (C. elegans) | |
| ASSAY0284 | Hs00194045_m1 | ABCA1 | ATP-binding cassette, | ACCCAATCCCAGACACGCCCTGCCA |
| | | | sub-family A (ABC1), | |
| | | | member 1 | |
| ASSAY0285 | Hs00194072_m1 | APBA2 | amyloid beta (A4) | AACATTCCAGAGACAAAGAAGGTGG |
| | | | precursor protein- | |
| | | | binding, family A, | |
| | | | member 2 | |
| ASSAY0286 | Hs00194400_m1 | LPP | LIM domain containing | GAGGACTTCCACAAGAAATTTGCCC |
| | | | preferred translocation | |
| | | | partner in lipoma | |
| ASSAY0290 | Hs00195343_m1 | SMNDC1 | survival motor neuron | GTGAAGATGGACAGTGTTATGAAGC |
| | | | domain containing 1 | |
| ASSAY0299 | Hs00197744_m1 | POLR3C | polymerase (RNA) III | CAGATAACAAGGAGCCCATTCCAGA |
| | | | (DNA directed) | |
| | | | polypeptide C (62 kD) | |
| ASSAY0304 | Hs00199030_m1 | EHD1 | EH-domain containing 1 | GGCTGGCCAAGGTTCACGCCTACAT |
| ASSAY0306 | Hs00199344_m1 | ZFHX3 | zinc finger homeobox 3 | AGGGCGGAGCATCGTCCAGCCAAGC |
| ASSAY0313 | Hs00201247_m1 | NCBP2 | nuclear cap binding | GACCAGCACTTCCGGGGTGACAATG |
| | | | protein subunit 2, | |
| | | | 20 kDa | |
| ASSAY0317 | Hs00201970_m1 | MGEA5 | meningioma expressed | GTGGAGGAAGCTGAGCAACTTATGA |
| | | | antigen 5 | |
| | | | (hyaluronidase) | |
| ASSAY0322* | Hs00203191_m1 | POLL | polymerase (DNA | GATTGAGCAGACAGTCCAGAAAGCA |
| | | | directed), lambda | |
| ASSAY0329 | Hs00204383_m1 | COMMD9 | COMM domain | AGAGCCTGCTCAAGGCCTCCTCGAA |
| | | | containing 9 | |
| ASSAY0332* | Hs00205182_m1 | SND1 | staphylococcal | CAGCGAGAGGTGGAGGTGGAGGTGG |
| | | | nuclease and tudor | |
| | | | domain containing 1 | |
| ASSAY0335 | Hs00207926_m1 | SEC24D | SEC24 family, member | CAGCAAGCCAGCTTATTCTACCAGA |
| | | | D (S. cerevisiae) | |
| ASSAY0343 | Hs00211070_m1 | ERGIC3 | ERGIC and golgi 3 | CAGCAAGCCAGCTTATTCTACCAGA |
| ASSAY0346* | Hs00211420_m1 | FIS1 | fission 1 (mitochon- | CTGCTCGAGGAGCTGCTGCCCAAAG |
| | | | drial outer membrane) | |
| | | | homolog (S. cerevisiae) | |
| ASSAY0348* | Hs00212451_m1 | CAB39 | calcium binding | GCTCATTGACTTTGAGGGCAAAAAA |
| | | | protein 39 | |
| ASSAY0352 | Hs00213029_m1 | SIRT7 | sirtuin (silent mating | AATCAGCACGGCAGCGTCTATCCCA |
| | | | type information | |
| | | | regulation 2 homolog) | |
| | | | 7 (S. cerevisiae) | |
| ASSAY0356* | HS00214159_m1 | FAM46A | family with sequence | ACTCACGCTCAAGGAAGCTTATGTG |
| | | | similarity 46, member A | |
| ASSAY0359* | Hs00214745_m1 | DPP8 | dipeptidyl-peptidase 8 | CTGCCTGCTCCAAGTGATTTCAAGT |
| ASSAY0366 | Hs00215835_m1 | C19orf60 | chromosome 19 open | CAGCAGCTGAAAATGAAGGTAATTA |
| | | | reading frame 60 | |
| ASSAY0370* | Hs00217272_m1 | NUP133 | nucleoporin 133 kDa | AACTTTTAAAAGATGGCATTCAGCT |
| ASSAY0372* | Hs00218079_m1 | FBXL8 | F-box and leucine-rich | CACAAAAATCAGTTGCGAATGTGAG |
| | | | repeat protein 8 | |
| ASSAY0378 | Hs00400987_m1 | DTX3 | deltex homolog 3 | CTGACGAGAGCTGCATTTGGAAGTG |
| | | | (Drosophila) | |
| ASSAY0382 | Hs00706913_g1 | PCNP | PEST proteolytic | AATGTAGGCAAACTATCAATTTTTT |
| | | | signal containing | |
| | | | nuclear protein | |
| ASSAY0393 | Hs00295454_s1 | N/A | N/A | AGCTAAGAGGTTTCCAGTGCAATAC |
| ASSAY0402 | Hs00390635_m1 | TNIK | TRAF2 and NCK | ACCCATCAGAGCAAGCAACCCTGAT |
| | | | interacting kinase | |
| ASSAY0407* | Hs00540709_s1 | TMEM203 | transmembrane | CGGGAGCTGGTGCAGTGGCTAGGCT |
| | | | protein 203 | |
| ASSAY0408* | Hs00559348_m1 | CR1 | complement component | TGTTCCTGCTGCCTGCCCACATCCA |
| | | | (3b/4b) receptor 1 | |
| | | | (Knops blood group) | |
| ASSAY0410 | Hs00607709_m1 | FAM96A | family with sequence | CACTCAACAGAAGAAGACATCAATA |
| | | | similarity 96, member A | |
| ASSAY0421* | Hs00609836_m1 | AARS | alanyl-tRNA synthetase | CAAAATTTGGGGCTGGATGACACCA |
| ASSAY0425 | Hs00610478_m1 | PWP2 | PWP2 periodic | GGCTGGCCAAGTACTTCTTCAATAA |
| | | | tryptophan protein | |
| | | | homolog (yeast) | |
| ASSAY0429* | Hs00611133_m1 | MRPL10 | mitochondrial ribo- | CGCTGCTAGGTGGCTGCATTGATGA |
| | | | somal protein L10 | |
| ASSAY0432 | Hs00696974_m1 | BUD31 | BUD31 homolog | GAAAGCCATCAGCAGAGAACTCTAT |
| | | | (S. cerevisiae) | |
| ASSAY0440 | Hs00706419_s1 | SELT | selenoprotein T | ACATGATTGAGAACCAGTGTATGTC |
| ASSAY0443* | Hs00739474_g1 | EIF5A; | eukaryotic translation | GAAGAGATCCTGATCACGGTGCTGT |
| | | EIF5AL1 | initiation factor 5A; | |
| | | | eukaryotic translation | |
| | | | initiation factor | |
| | | | 5A-like 1 | |
| ASSAY0445 | Hs00740463_m1 | CSNK1A1 | casein kinase 1, | GGCAAGGGCTAAAGGCTGCAACAAA |
| | | | alpha 1 | |
| ASSAY0450* | Hs00743508_s1 | C18orf32 | chromosome 18 open | AGGTAGAATTTTGGGAGGTAATAAT |
| | | | reading frame 32 | |
| ASSAY0451 | Hs00745818_s1 | ZNF595 | zinc finger protein 595 | CAAAGCTTTTAATCGGCCCTCAACC |
| ASSAY0453* | Hs00748530_s1 | UBE2L3 | ubiquitin-conjugating | CTAAGATGCTGCGATCCCGTTCTGC |
| | | | enzyme E2L 3 | |
| ASSAY0455* | Hs00748915_s1 | PFN1 | profilin 1 | TTTTTGGGCCATTACCCCATACCCC |
| ASSAY0456* | Hs00750443_s1 | ARL8B | ADP-ribosylation | GTGTGACTCTGTGGGGACTGCATAG |
| | | | factor-like 8B | |
| ASSAY0458 | Hs00751057_s1 | GOT2 | glutamic-oxaloacetic | GCTGATGCCGTACCCTCACCCTTTT |
| | | | transminase 2, mito- | |
| | | | chondrial (aspartate | |
| | | | aminotransferase 2) | |
| AASAY0459 | Hs00754648_s1 | SFRS13A | splicing factor, | TGATGCCAGCTGGGAAATTGAGTTT |
| | | | arginine/serine-rich | |
| | | | 13A | |
| ASSAY0460 | Hs00759012_s1 | MTRF1L | mitochondrial | CGGACTAAGGATGCGGTCCCGGGTT |
| | | | translational release | |
| | | | factor 1-like | |
| ASSAY0464* | Hs00793391_m1 | CSNK1A1 | casein kinase 1, | AGTTTTATGTAAGGGGTTTCCTGCA |
| | | | alpha 1 | |
| ASSAY0467 | Hs00798979_s1 | CCT6A | chaperonin containing | TTTGGGATGTCAGCAGTGGCCTGAA |
| | | | TCP1, subunit 6A | |
| | | | (zeta 1) | |
| ASSAY0474* | Hs00235003_m1 | PTGDR | prostaglandin D2 | GCCCGTAATTTATCGCGCTTACTAT |
| | | | receptor (DP) | |
| ASSAY0477* | Hs00237035_m1 | TRAF3 | TNF receptor- | TCGCGCTGCAGAAACACGAAGACAC |
| | | | associated factor 3 | |
| ASSAY0478 | Hs00237047_m1 | YWHAZ | tyrosine 3-monooxy- | GATAAAAAGAACATCCAGTCATGGA |
| | | | genase/tryptophan 5- | |
| | | | monooxygenase | |
| | | | activation protein, | |
| | | | zeta polypeptide | |
| ASSAY0479* | Hs00240906_m1 | SNCA | synuclein, alpha (non | GTGGCAACAGTGGCTGAGAAGACCA |
| | | | A4 component of | |
| | | | amyloid precursor) | |
| ASSAY0480* | Hs00242160_m1 | HHEX | hematopoietically | ACCCCCTGGGCAAACCTCTACTCTG |
| | | | expressed homeobox | |
| ASSAY0481 | Hs00242737_m1 | LTB | lymphotoxin beta (TNF | ATCAGGGAGGACTGGTAACGGAGAC |
| | | | superfamily, member 3) | |
| ASSAY0482 | Hs00242770_m1 | MBD1 | methyl-CpG binding | ATTACCAGAGCCCCACAGGAGACAG |
| | | | domain protein 1 | |
| ASSAY0483 | Hs00243655_s1 | CDK5R1 | cyclin-dependent | CCGGAAGGCCACGCTGTTTGAGGAT |
| | | | kinase 5, regulatory | |
| | | | subunit 1 (p35) | |
| ASSAY0484* | Hs00244740_m1 | CDC25B | cell division cycle 25 | GGCGGAGCAGACGTTTGAACAGGCC |
| | | | homolog B (S. pombe) | |
| ASSAY0486 | Hs00247895_s1 | LSM14B | LSM14B, SCD6 homolog | GAGCCTGGGATGAGCCCCGGCAGCG |
| | | | B (S. cerevisiae) | |
| ASSAY0502 | Hs00257171_s1 | GALNT10 | UDP-N-acetyl-alpha-D- | AGATTCTGCACAAGTCAGCAGTGCA |
| | | | galactosamine: poly- | |
| | | | peptide N-acetyl- | |
| | | | galactosaminyltrans- | |
| | | | ferase 10 (GalNAc-T10) | |
| ASSAY0504 | Hs00257861_m1 | COQ10B | coenzyme Q10 homolog | CGCCCGTGCGGAATGGCAGATATTT |
| | | | B (S. cerevisiae) | |
| ASSAY0512* | Hs00260786_m1 | ARFGAP2 | ADP-ribosylation factor | GTATCCCGAAGCTCTGTCTCCCACT |
| | | | GTPase activating | |
| | | | protein 2 | |
| ASSAY0516 | Hs00261620_m1 | HINT2 | histidine triad | GCGCGGGGGGCAGGTCCGAGGAGCT |
| | | | nucleotide binding | |
| | | | protein 2 | |
| ASSAY0523* | Hs00264679_m1 | CST3 | cystatin C | CGCCCGCAAGCAGATCGTAGCTGGG |
| ASSAY0534* | Hs00268265_m1 | SMARCC1 | SWI/SNF related, | CCAAACTCCCTGCAAAGTGTTTCAT |
| | | | matrix associated, | |
| | | | actin dependent | |
| | | | regulator of chromatin, | |
| | | | subfamily c, member 1 | |
| ASSAY0538 | Hs00269779_m1 | GGT5 | gamma- | TCAGCCAGGAGGTGCAGAGGGGACT |
| | | | glutamyltransferase 5 | |
| ASSAY0540* | Hs00270536_m1 | SNRNP40 | small nuclear | TGAGCCCATCATTATCTCAGCATCG |
| | | | ribonucleoprotein | |
| | | | 40 kDa (U5) | |
| ASSAY0541* | Hs00270620_s1 | IER2 | immediate early | CCCCGCCAAAGTCAGCCGCAAACGA |
| | | | response 2 | |
| ASSAY0543 | Hs00272235_m1 | EIF3M | eukaryotic translation | AGAAGAGTGATGCTGCTTCAAAAGT |
| | | | initiation factor 3, | |
| | | | subunit M | |
| ASSAY0544 | Hs00272381_s1 | CDC43EP3 | CDC42 effector protein | ACTCCTCCAGCCTGTCCGAACAGTA |
| | | | (Rho GTPase binding) 3 | |
| ASSAY0546* | Hs00272828_m1 | ZFP36L2 | zinc finger protein 36, | GTCGACTTCTTGTGCAAGACAGAGA |
| | | | C3H type-like 2 | |
| ASSAY0551 | Hs00275054_m1 | HSD17B12 | hydroxysteroid (17- | GTGGAAAGATCCAAAGGGGCTATTC |
| | | | beta) dehydrogenase 12 | |
| ASSAY0552 | Hs00275374_s1 | BET1L | blocked early in | TCTCCATCCATGCTCACCATAGCCC |
| | | | transport 1 homolog | |
| | | | (S. cerevisiae)-like | |
| ASSAY0560* | Hs00291823_m1 | ZMAT2 | zinc finger, matrin | AAAAGAAAGATGGAAAACCAGTGCA |
| | | | type 2 | |
| ASSAY0563 | Hs00292725_m1 | IFT20 | intraflagellar trans- | GGGGCCGGCAGCCATGGCCAAGGAC |
| | | | port 20 homolog | |
| | | | (Chlamydomonas) | |
| ASSAY0565* | Hs00293336_m1 | TMEM129 | transmembrane | TTTGACATCTGGAGCTGGAGGCCTG |
| | | | protein 129 | |
| ASSAY0566 | Hs00293370_m1 | SPPL3 | signal peptide | TATTTAAAGGGCGACCTCCGGCGGA |
| | | | peptidase 3 | |
| ASSAY0568 | Hs00298999_m1 | SLC38A10 | solute carrier family | TTCGCCTGCCAGTCCCAGGTGCTGC |
| | | | 38, member 10 | |
| ASSAY0572 | Hs0300396_m1 | PELP1 | proline, glutamate and | TCTCTCAAAGGCAAGCTGGCCTCAT |
| | | | leucine rich protein 1 | |
| ASSAY0579* | Hs00330066_m1 | CCNY | cyclin Y | CCGTCGTCACCCTGGTGTACCTTGA |
| ASSAY0585 | Hs00358616_m1 | STK16 | serine/threonine | GTGAGCGGACTGATGTCTGGTCCCT |
| | | | kinase 16 | |
| ASSAY0588* | Hs00360923_g1 | CRELD2 | cysteine-rich with | TCCAAGTACGAGTCCAGCGAGATTC |
| | | | EGF-like domains 2 | |
| ASSAY0593 | Hs00362511_g1 | SUGT1 | SGT1, supressor of | CTGCAACATCCCAGAGGTTTTTCCA |
| | | | G2 allele of SKP1 | |
| | | | (S. cerevisiae) | |
| ASSAY0597 | Hs00364835_m1 | LRG1 | leucine-rich alpha-2- | ACCAAAAAGCCCAGGGGGCATTCAA |
| | | | glycoprotein 1 | |
| ASSAY0599 | Hs00365678_g1 | RAB24 | RAB24, member RAS | GTATTTGGGACACAGCAGGCTCTGA |
| | | | oncogene family | |
| ASSAY0603* | Hs00368207_m1 | PREX1 | phosphatidylinositol- | CTTCTTGCAGTCGGCATTCCTGCAT |
| | | | 3,4,5-triphosphate- | |
| | | | dependent Rac | |
| | | | exchange factor 1 | |
| ASSAY0611 | Hs00371424_s1 | HIST1H4D | histone cluster 1, H4d | TTCGGCGGCTGAGCTTACCTCTACA |
| ASSAY0612* | Hs00372401_g1 | COMMD4 | COMM domain | GGGACAGGGGATTGATTATGAGAAG |
| | | | containing 4 | |
| ASSAY0617 | Hs00375440_m1 | TMEM168 | transmembrane | CCCACCAACTTCTGCAGTCCTGATG |
| | | | protein 168 | |
| ASSAY0618 | Hs00375485_m1 | PGS1 | phosphatidylglycero- | TTTTCGAGCTCATGAAGGGGCAGAT |
| | | | phosphate synthase 1 | |
| ASSAY0619 | Hs00375556_m1 | PIP4K2C | phosphatidylinositol- | CCTTTTCCACAGGGAAAATCTGCCC |
| | | | 5-phosphate 4-kinase, | |
| | | | type II, gamma | |
| ASSAY0624 | Hs00377427_m1 | APBB1 | amyloid beta (A4) | TCCCCAGAGGACACAGATTCCTTCT |
| | | | precursor protein- | |
| | | | binding, family B, | |
| | | | member 1 (Fe65) | |
| ASSAY0625* | Hs00378208_m1 | UBR4 | ubiquitin protein | CACTTGCTTGGCAAGACACAACACT |
| | | | ligase E3 component | |
| | | | n-recognin 4 | |
| ASSAY0627* | Hs00378635_m1 | EXOSC8 | exosome component 8 | GCTGGGTTCAAAACCGTGGAACCTC |
| ASSAY0628* | Hs00378772_m1 | KIAA0368 | KIAA0368 | GGAGACCCAACGTTGTTATCGTCAG |
| ASSAY0632 | Hs00379295_m1 | C1orf144 | chromosome 1 open | AACCCATCCTCGACAGGCCAACCAG |
| | | | reading frame 144 | |
| ASSAY0634 | Hs00379889_m1 | PQLC3 | PQ loop repeat | GACCTGGCCATGAATCTATGTACTT |
| | | | containing 3 | |
| ASSAY0637 | Hs00383718_m1 | C5AR1 | complement component | AGACCAGAACATGAACTCCTTCAAT |
| | | | 5a receptor 1 | |
| ASSAY0638 | Hs00384448_m1 | PARS2 | prolyl-tRNA synthetase | GGCTGGGATTGCGGTGCCTGTGCTT |
| | | | 2, mitochondrial | |
| | | | (putative) | |
| ASSAY0641* | Hs00385203_g1 | FBXW5 | F-box and WD repeat | CCTGTCGCCCGACAACAGGTACCTG |
| | | | domain containing 5 | |
| ASSAY0645* | Hs00387426_m1 | MAP2K4 | mitogen-activated | CAAATAATGGCAGTTAAAAGAATTC |
| | | | protein kinase kinase 4 | |
| ASSAY0648* | Hs00389570_m1 | SEC16A | SEC16 homolog A | AACCTAAGAAGGGTGAATCCTGGTT |
| | | | (S. cerevisiae) | |
| ASSAY0653 | Hs00393297_m1 | ZNF512B | zinc finger protein | TGGTAAGAAAAGGGCTGCGGACAGC |
| | | | 512B | |
| ASSAY0654 | Hs00393592_m1 | FZR1 | fizzy/cell division | ACGATGCCACGCGTCACAGAGATGC |
| | | | cycle 20 related 1 | |
| | | | (Drosophila) | |
| ASSAY0656 | Hs00395045_m1 | STMN3 | stathmin-like 3 | CCAGTACGGGGACATGGAGGTGAAG |
| ASSAY0657* | Hs00397738_m1 | PPP1R3E | protein phosphatase 1, | GGGGAGTGATGACAGAAGGGATGGA |
| | | | regulatory (inhibitor) | |
| | | | subunit 3E | |
| ASSAY0660 | Hs00402617_m1 | MPZL3 | myelin protein zero- | GTGCCTGGATTCAGACTATGAAGAG |
| | | | like 3 | |
| ASSAY0665 | Hs00406064_m1 | DNAJC2 | DnaJ (Hsp40) homolog, | TCAAAGCAGCTCATAAAGCAATGGT |
| | | | subfamily C, member 2 | |
| ASSAY0672* | Hs00412706_m1 | MIA3 | melanoma inhibitory | AGTGAATTTGGATCAGTGGACGGGC |
| | | | activity family, | |
| | | | member 3 | |
| ASSAY0676 | Hs00414732_g1 | LSMD1 | LSM domain containing 1 | AGCCGTCGGATTCCTTCTCTGCCGG |
| ASSAY0677 | Hs00414889_m1 | ANKRD36B | ankyrin repeat domain | GAAGGAAAGGACTGCCCTACATTTG |
| | | | 36B | |
| ASSAY0683 | Hs00417251_m1 | SNHG6 | small nucleolar RNA | TAGCTGGGCTCTGCGAGGTGCAAGA |
| | | | host gene 6 (non- | |
| | | | protein coding) | |
| ASSAY0684 | Hs00417273_m1 | LRRK2 | leucine-rich repeat | TTTGGCCCTCCTCACTGAGACTATT |
| | | | kinase 2 | |
| ASSAY0686 | Hs00418955_m1 | SMCHD1 | structural maintenance | AAGGATTTTAAATGGACAGGAACAG |
| | | | of chromosomes | |
| | | | flexible hinge domain | |
| | | | containing 1 | |
| ASSAY0697 | Hs00428488_g1 | PRDX2 | peroxiredoxin 2 | CCTTTGCCCACGCAGCTTTCAGTCA |
| ASSAY0710* | Hs00536891_m1 | ITSN2 | intersectin 2 | GCTATGAATGGAGGGCCAAACATGT |
| ASSAY0713 | Hs00538077_m1 | C5orf41 | chromosome 5 open | ACACCCACAGACAGCATCGCACAGA |
| | | | reading frame 41 | |
| ASSAY0714* | Hs00538879_s1 | LUC7L3 | LUC7-like 3 | GTTACACTCAATGCAATTCTCAAGT |
| | | | (S. cerevisiae) | |
| ASSAY0715* | Hs00539341_m1 | C10orf137 | chromosome 10 open | AGACTAGTGAGCAAATCTGTGTCTG |
| | | | reading frame 137 | |
| ASSAY0719 | Hs00540753_m1 | DYNLL2 | dynein, light chain, | GCCTCCGTGAAGTGTCACACCATGT |
| | | | LC8-type 2 | |
| ASSAY0720* | Hs00540812_m1 | CCDC101 | coiled-coil domain | AGAGGCTGAGTGCAACATCCTTCGG |
| | | | containing 101 | |
| ASSSAY0723 | Hs00542109_m1 | FBXL16 | F-box and leucine-rich | ACGGACGCAGGCCTCGAGGTTATGC |
| | | | repeat protein 16 | |
| ASSAY0728 | Hs00544515_s1 | C14orf139 | chromosome 14 open | CCAGGGGACGGGAGCAGGTACCCAC |
| | | | reading frame 139 | |
| ASSAY0733 | Hs00602949_g1 | NIP7 | nuclear import 7 | TGTACTATGTGAGTGAGAAGATTAT |
| | | | homolog (S. cerevisiae) | |
| ASSAY0736 | Hs00603727_g1 | EIF1 | eukaryotic translation | TTAAGAAAAAGTTTGCCTGCAATGG |
| | | | initiation factor 1 | |
| ASSAY0739 | Hs00606808_m1 | MRPS6 | mitochondrial | ACAACAGAGGCGGGTATTTCTTGGT |
| | | | ribosomal protein S6 | |
| ASSAY0741 | Hs00606874_g1 | TNFRSF13 | tumor necrosis factor | CGGAGACAAGGACGCCCCAGAGCCC |
| | | C | receptor superfamily, | |
| | | | member 13C | |
| ASSAY0743 | Hs00818252_g1 | KPNA2 | karyopherin alpha 2 | TCATCTTTAGCATGTGGCTACTTAC |
| | | | (RAG cohort 1, | |
| | | | importin alpha 1) | |
| ASSAY0746 | Hs00828573_m1 | TMCC1 | transmembrane and | CCGGGACATCCAGGAGGCCCTGGAG |
| | | | coiled-coil domain | |
| | | | family 1 | |
| ASSAY0748* | Hs00830558_g1 | FOXN3 | forkhead box N3 | TCTAGGGACTTGGTGTTGCTTGGAA |
| ASSAY0752 | Hs00854645_g1 | BRI3 | brain protein I3 | CCTTCCTGGGCATCTTCCTGGCCAT |
| ASSAY0753 | Hs00855332_g1 | LDHA | lactate dehydrogenase A | TCTGACGCACCACTGCCAATGCTGT |
| ASSAY0754 | Hs00867656_s1 | DLEU2 | deleted in lymphocytic | AAAAATTTATTTTACACATGTCAAG |
| | | | leukemia 2 (non- | |
| | | | protein coding) | |
| ASSAY0756 | Hs00894392_m1 | TBX21 | T-box 21 | ACAATGTGACCCAGATGATTGTGCT |
| ASSAY0760 | Hs00902008_m1 | CTCF | CCCTC-binding factor | AGAACCAGCCAACAGCTATCATTCA |
| | | | (zinc finger protein) | |
| ASSAY0780 | Hs00942554_m1 | RPL6 | ribosomal protein L6 | TCTTGCAAGATGGCGGGTGAAAAAG |
| ASSAY0781 | Hs00943178_g1 | PGK1 | phosphoglycerate | AGCCCACAGCTCCATGGTAGGAGTC |
| | | | kinase 1 | |
| ASSAY0797* | Hs00975865_m1 | BTK | Bruton | TTATCCCTTCCAGGTTGTATATGAT |
| | | | agammaglobulinemia | |
| | | | tyrosine kinase | |
| ASSAY0798 | Hs00976004_m1 | EDEM1 | ER degradation | CAACTCCAGCTCCAACTGCAATCGT |
| | | | enhancer, mannosidase | |
| | | | alpha-like 1 | |
| ASSAY0799* | Hs00982887_g1 | BCL2L12 | BCL2-like 12 | CCGCCCAGCCCAGAATTACAGGGTC |
| | | | (proline rich) | |
| ASSAY0802* | Hs00989184_m1 | GZMA | granzyme A (granzyme 1, | ACTCGTGCAATGGAGATTCTGGAAG |
| | | | cytotoxic T-lymphocyte- | |
| | | | associated serine | |
| | | | esterase 3) | |
| ASSAY0805 | Hs00996794_m1 | EPB42 | erythrocyte membrane | GAGAGGAGCTACAGATTCCGTTCAG |
| | | | protein band 4.2 | |
| ASSAY0807* | Hs00998133_m1 | TGFB1 | transforming growth | ACAGCAAGGTCCTGGCCCTGTACAA |
| | | | factor, beta 1 | |
| ASSAY0810 | Hs01007839_m1 | TNPO1 | transportin 1 | GAAGCTGCCTGCAGTGCCTTTGCTA |
| ASSAY0814* | Hs01013056_g1 | GLUL | glutamate-ammonia | TCTGAAGTACATCGAGGAGGCCATT |
| | | | ligase (glutamine | |
| | | | synthetase) | |
| ASSAY0819 | Hs01030693_m1 | ARHGAP17 | Rho GTPase activating | CCAAGATAGTAACAGACTCCAATTC |
| | | | protein 17 | |
| ASSAY0826 | Hs01036536_m1 | BCR | breakpoint cluster | ATTGCTGTGGTCACCAAGAGAGAGA |
| | | | region | |
| ASSAY0827 | Hs01037385_s1 | HMGB1 | high-mobility group | AAAGCAAAGGGAGGATAAAACAGTA |
| | | | box 1 | |
| ASSAY0831 | Hs01043735_m1 | ECE1 | endothelin converting | GCGGCCTATCGGGCTTACCAGAACT |
| | | | enzyme 1 | |
| ASSAY0834* | Hs01053201_s1 | ZBTB38 | zinc finger and BTB | GTAATAAGCTGTGTGACGGTCTTTA |
| | | | domain containing 38 | |
| ASSAY0836 | Hs01053867_s1 | NCRNA002 | non-protein coding | AGCGCCAGTGCTGGCATGGGCTTTC |
| | | 03 | RNA 203 | |
| ASSAY0844* | Hs01064792_m1 | TRANK1 | tetratricopeptide | TAAAGAAGGAAGGTATTGTTCAGGA |
| | | | and ankyrin repeat | |
| | | | containing 1 | |
| ASSAY0846* | Hs01065498_m1 | PIM1 | pim-1 oncogene | CAGAGGGTCTCTTCAGAATGTCAGC |
| ASSAY0854 | Hs01082775_m1 | TFAM | transcription factor A, | GGTGATTCACCGCAGGAAAAGCTGA |
| | | | mitochondrial | |
| ASSAY0856 | Hs01085351_m1 | STK39 | serine threonine | TAAGTTGGCTTCTGGCTGTGATGGG |
| | | | kinase 39 (STE20/SPS1 | |
| | | | homolog, yeast) | |
| ASSAY0857* | Hs01085739_g1 | ACHE | acetylcholinesterase | CTGCAGGTGCTGGTGGGTGTGGTGA |
| | | | (Yt blood group) | |
| ASSAY0858 | Hs01087966_m1 | MEG3 | maternally expressed | GGATCCCTCACCCGGGTCTCTCCTC |
| | | | 3 (non-protein coding) | |
| ASSAY0861* | Hs01093019_m1 | GSPT1 | G1 to S phase | CAGAGAAACTTGGTACTTGTCTTGG |
| | | | transition 1 | |
| ASSAY0865* | Hs01107136_m1 | RPIA | ribose 5-phosphate | GTGATCGCTGATTTCAGGAAAGATT |
| | | | isomerase A | |
| ASSAY0871* | Hs01114250_m1 | TGFBR3 | transforming growth | TCTATTCTCACACAGGGGAGACAGC |
| | | | factor, beta receptor | |
| | | | III | |
| ASSAY0876* | Hs01372307_m1 | ZDHHC18 | zinc finger, DHHC-type | ACCTCCCAGCCTAATTGACCGGAGG |
| | | | containing 18 | |
| ASSAY0882* | Hs01550808_m1 | MX2 | myxovirus (influenza | GAATGCCTACTTCTTGGAAACCAGC |
| | | | virus) resistance 2 | |
| | | | (mouse) | |
| ASSAY0886 | Hs01564142_m1 | GLIPR1 | GLI pathogenesis- | CTATACATGACTTGGGACCCAGCAC |
| | | | related 1 | |
| ASSAY0888* | Hs01577197_m1 | PSEN2 | presenilin 2 | CCTCATTGGCTTGTGTCTGACCCTC |
| | | | (Alzheimer disease 4) | |
| ASSAY0893* | Hs01591359_s1 | N/A | N/A | AGTGCCCTTTAGATGATTCCCCCTC |
| ASSAY0894 | Hs01592406_m1 | UBE2F | ubiquitin-conjugating | AACATTAAAGGATGTCGTTTGGGGA |
| | | | enzyme E2F (putative) | |
| ASSAY0900* | Hs01636043_s1 | SRP9 | signal recognition | TGCTGTTGTGACCAATAAATATAAA |
| | | | particle 9 kDa | |
| ASSAY0914 | Hs02339116_s1 | OR52K1 | olfactory receptor, | GGCAGTTCTCCAGCTTGCCTCTCAG |
| | | | family 52, subfamily K, | |
| | | | member 1 | |
| ASSAY0916 | Hs02339727_m1 | ZNF708 | zinc finger protein 708 | CAAACCCCCAGCTATGTGTTCTCAT |
| ASSAY0923 | Hs02621508_s1 | TNFAIP8 | tumor necrosis factor, | AAATACAGATGTCTCCAGACCTGAG |
| | | | alpha-induced protein 8 | |
| ASSAY0924 | Hs02638995_g1 | PRELID1; | PRELI domain containing | CGCCCGGCTGATGGTGGTGGAGGAA |
| | | LOC728666; | 1; similar to Px19- | |
| | | LOC388955 | like protein (25 kDa | |
| | | | protein of relevant | |
| | | | evolutionary and | |
| | | | lymphoid interest) | |
| | | | (PRELI); PX19 protein | |
| | | | pseudogene | |
| ASSAY0925 | Hs02863396_m1 | GNA12 | guanine nucleotide | AGCGAGTTTCAGCTGGGGGAGTCGG |
| | | | binding protein (G | |
| | | | protein) alpha 12 | |
| ASSAY0929 | Hs03044361_m1 | CYBA | cytochrome b-245, | ATCTCCTGCTCTCGGTGCCCGCCGG |
| | | | alpha polypeptide | |
| ASSAY0933 | Hs99999148_m1 | CCL4 | chemokine (C-C motif) | TCCAGCGCTCTCAGCACCAATGGGC |
| | | | ligand 4 | |
| ASSAY0934 | Hs00929873_m1 | CSF2 | colony stimulating | CAGAAATGTTTGACCTCCAGGAGCC |
| | | | factor 2 (granulocyte- | |
| | | | marcophage) | |
| ASSAY0936 | Hs00245438_m1 | MVP | major vault protein | GGCCTACAACTGGCACTTTGAGGTG |
| ASSAY0941 | Hs00328784_s1 | MTMR3 | myotubularin releated | CCCTCGGGAAGGTTGGTATTGAGGG |
| | | | protein 3 | |
| ASSAY0944* | Hs01587378_mH | TOMM40 | translocase of outer | CCCACAGAGGCGTTCCCTGTACTGG |
| | | | mitochondrial membrane | |
| | | | 40 homolog (yeast) | |
| ASSAY0950 | Hs01123468_m1 | DIDO1 | death inducer- | ATGCGGTGCTCAGGCAGGTATTAAA |
| | | | obliterator 1 | |
| ASSAY0951 | Hs00293472_m1 | C19orf36 | chromosome 19 open | ATCGAAAGCCGCATCGACTGTCAGC |
| | | | reading frame 36 | |
| ASSAY0962* | Hs00211306_m1 | DHRS7 | dehydrogenase/reductase | CTTTAAGAGTGGTGTGGATGCAGAC |
| | | | (SDR family) member 7 | |
| ASSAY0970 | Hs00210321_m1 | ZBTB20 | zinc finger and BTB | TGAAACTACTGAAGAAACCCAAGAC |
| | | | domain containing 20 | |
| ASSAY0980 | Hs00400648_m1 | DENND4A | DENN/MADD domain | AGAACTATGCAATGGAGGTTCTCAT |
| | | | containing 4A | |
| ASSAY0982 | Hs00171488_m1 | SLIT1 | slit homolog 1 | ACCGAGCGCCTGGAACTCAATGGCA |
| | | | (Drosophila) | |
| ASSAY0996 | Hs00369838_s1 | GPR82 | G protein-coupled | ATGGGAATATCAATCTGCTCAATGC |
| | | | receptor 82 | |
| ASSAY0998 | Hs00162661_m1 | TMBIM6 | transmembrane BAX | CACTCATTTCATTCAGGCTGGCCTG |
| | | | inhibitor motif | |
| | | | containing 6 | |
| ASSAY1000 | Hs00403541_m1 | FAM129C | family with sequence | CTGCCCTGAATCCTTGGGAGACCAT |
| | | | similarity 129, | |
| | | | member C | |
| ASSAY1001 | Hs00155586_m1 | MPPED1 | metallophosphoesterase | AGTGGCTGGGCAGCCTGCCCTACGA |
| | | | domain containing 1 | |
| ASSAY1004 | Hs00182998_m1 | LRP8 | low density lipoprotein | GGACGACTGCCCCAAGAAGACCTGT |
| | | | receptor-related | |
| | | | protein 8, apolio- | |
| | | | protein 8 receptor | |
| ASSAY1010* | Hs00394748_m1 | AGRN | agrin | GAGTTCTGTGTGGAAGATAAACCCG |
| ASSAY1025 | Hs00182082_m1 | MYD88 | myeloid differentiation | CCCAGCATTGAGGAGGATTGCCAAA |
| | | | primary response gene | |
| | | | (88) | |
| ASSAY1026 | Hs00162271_m1 | SPTBN1 | spectin, beta, non- | GCTCTGGGCACACAGGTGAGGCAGC |
| | | | erythrocytic 1 | |
| ASSAY1030 | Hs00355914_m1 | ALDH2 | aldehyde dehydrogenase | AAATGTCTCCGGTATTATGCCGGCT |
| | | | 2 family | |
| | | | (mitochondrial) | |
| ASSAY0136 | Hs00218198_m1 | DCP1A | DCP1 decapping enzyme | CCATCCCGGTTGCAGGCGCCCCACT |
| | | | A (S. cerevisiae) | |
| ASSAY1042* | Hs00202482_m1 | ACOT9 | acyl-CoA thioesterase 9 | CTGAAAATAAAGGGCCGGCATTTGT |
| ASSAY0148 | Hs00174752_m1 | EPHB4 | EPH receptor B4 | GACCCAACTGGATGAGAGCGAGGGC |
| ASSAY1056 | Hs00698399_m1 | LRRC50 | leucine rich repeat | TGCCCGATTTGCGTGTACTGAATTT |
| | | | containing 50 | |
| ASSAY1064* | Hs00559914_m1 | YKT6 | YKT6 v-SNARE homolog | TATAAAACTGCCCGGAAACAAAACT |
| | | | (S. cerevisiae) | |
| ASSAY1083 | Hs00559278_m1 | DPYD | dihydropyrimidine | TCATGGACAAGAAACTGCCAAGTTT |
| | | | dehydrogenase | |
| ASSAY1084* | Hs00390223_m1 | UBR4 | ubiquitin protein | ACATGACCACAGGTACAGAATCAGA |
| | | | ligase E3 component | |
| | | | n-recognin 4 | |
| ASSAY1088* | Hs00374213_m1 | GLUL | glutamate-ammonia | TTTCTGTGGCTGGGAACACCTTCCA |
| | | | ligase (glutamine | |
| | | | synthetase) | |
| ASSAY1096* | Hs00323180_m1 | ZNF862 | zinc finger protein 862 | TGGCATCCTTGGGACCTGCTGCTGC |
| ASSAY1100* | Hs00186918_m1 | SNX3 | sorting nexin 3 | AAAGAGAGAGCAAGGTCGTAGTTCC |
| ASSAY1101* | Hs00536591_g1 | MTG1 | mitochondrial GTPase | CCGAAAAGAGAACCTGGAGTACTGT |
| | | | 1 homolog | |
| | | | (S. cerevisiae) | |
| ASSAY1104 | Hs00261330_s1 | NT5DC1 | 5-nucleotidase domain | CATATCGATGCATGCAATGGAAAGA |
| | | | containing 1 | |

Assays with p values <0.05 are marked with an asterisk.

TABLE 7
Informative probes for Prodromal AD versus Progressed AD
(All probes have p-value <0.5)

| Sequence No. | | Gene | | Context Sequence |
|---|---|---|---|---|
| (DiaGenic Assay ID) | Assay ID | Symbol | Gene name | (Oligonucleotide sequence) |
| ASSAY0011 | Hs99999905_m1 | GAPDH | glyceraldehyde-3- | GGGCGCCTGGTCACCAGGGCTGCTT |
| | | | phosphate | |
| | | | dehydrogenase | |
| ASSAY0012 | Hs00158122_m1 | ISG20 | interferon stimulated | GCATCCAGAACAGCCTGCTTGGACA |
| | | | exonuclease gene | |
| | | | 20 kDa | |
| ASSAY0022 | Hs00190463_m1 | C21orf33 | chromosome 21 open | GGGAAGCCCATCGGCTTGTGCTGCA |
| | | | reading frame 33 | |
| ASSAY0038 | Hs00218782_m1 | RNF114 | ring finger protein | TGCCCTGCGGACACGTCTTTTGCTC |
| | | | 114 | |
| ASSAY0041 | Hs00219523_m1 | C1orf183 | chromosome 1 open | TCAAACAGGAGCTGATGTCCATGAA |
| | | | reading frame 183 | |
| ASSAY0052 | Hs00220814_m1 | SLC44A2 | solute carrier family | AAACGAGAACAAACCCTATCTGTTT |
| | | | 44, member 2 | |
| ASSAY0057 | Hs00221859_m1 | SQRDL | sulfide quinone | GTTGAGCCCAGTGAGAGACATTTCT |
| | | | reductase-like (yeast) | |
| ASSAY0082 | Hs00228787_m1 | COASY | Coenzyme A synthase | AAAGATCTGTTGAAGAGCAAGTTGC |
| ASSAY0093 | Hs00233856_m1 | LRP1 | low density lipo- | CCCCTGAGATTTGTCCACAGAGTAA |
| | | | protein receptor- | |
| | | | related protein 1 | |
| ASSAY0096 | Hs00234224_m1 | ADAM17 | ADAM metallopeptidase | GGTGTCCAGTGCAGTGACAGGAACA |
| | | | domain 17 | |
| ASSAY0099 | Hs00153853_m1 | ADAM10 | ADAM metallopeptidase | AAACAGTGCAGTCCAAGTCAAGGTC |
| | | | domain 10 | |
| ASSAY0113 | Hs00157831_m1 | GTF2E2 | general transcription | GCCCTTCTCACTCAGCATTATGGAT |
| | | | factor IIE, poly- | |
| | | | peptide 2, beta 34 kDa | |
| ASSAY0114 | Hs00157950_m1 | HLA-DOB | major histocompat- | ACAGACTCTCCAGAAGATTTTGTGA |
| | | | ibility complex, | |
| | | | class II, DO beta | |
| ASSAY0122 | Hs00160118_m1 | PLD1 | phospholipase D1, | CTTAAACGAAAAGCACAACAAGGAG |
| | | | phosphatidylcholine- | |
| | | | specific | |
| ASSAY0128 | Hs00163761_m1 | BTK | Bruton | GTCAGGACTGAGCACACAGGTGAAC |
| | | | agammaglobulinemia | |
| | | | tyrosine kinase | |
| ASSAY0135 | Hs00170192_m1 | PNN | pinin, desmosome | GGCAGTCAGTAGGCTGGGCGGGGAG |
| | | | associated protein | |
| ASSAY0140 | Hs00173196_m1 | ZNF146 | zinc finger protein | AGGATCTGCGCGGAAGAAGCCTGAG |
| | | | 146 | |
| ASSAY0148 | Hs00174575_m1 | CCL5 | chemokine (C-C motif) | CAACCCAGCAGTCGTCTTTGTCACC |
| | | | ligand 5 | |
| ASSAY0181 | Hs00188259_m1 | WARS | tryptophanyl-tRNA | AACCAAGGTCAATAAGCATGCGTTT |
| | | | synthetase | |
| ASSAY0184 | Hs00189461_m1 | BPTF | bromodomain PHD | AGCAGCACTCCAGGTAGGCGAAAAC |
| | | | finger transcription | |
| | | | factor | |
| ASSAY0189 | Hs00190028_m1 | NDUFS3 | NADH dehydrogenase | CGACACGCGCCCCACTGTCAGACCA |
| | | | (ubiquinone) Fe-S | |
| | | | protein 3, 30 kDa | |
| | | | (NADH-coenzyme Q | |
| | | | reductase) | |
| ASSAY0207 | Hs00196206_m1 | GZMA | granzyme A | CCTGCTAATTCCTGAAGATGTCTGT |
| | | | (granzyme 1, cyto- | |
| | | | toxic T-lymphocyte- | |
| | | | associated serine | |
| | | | esterase 3) | |
| ASSAY0209 | Hs00200082_m1 | UBL3 | ubiquitin-like 3 | CAATTGGCCAATGGACTGGGAAGAA |
| ASSAY0210 | Hs00203291_m1 | CCDC106 | coiled-coil domain | CTCGGATGGAGGCAGAGGACCACTG |
| | | | containing 106 | |
| ASSAY0216 | Hs00209573_m1 | KIF13B | kinesin family member | TGCCAACAGGAAGCGAGGCTCTCTT |
| | | | 13B | |
| ASSAY0223 | Hs00215938_m1 | RNF31 | ring finger protein 31 | TGCCCCACAACCGGATGCAGGCCCT |
| ASSAY0230 | Hs00228829_m1 | TNKS2 | tankyrase, TRF1- | TGAAACAGCATTGCATTGTGCTGCT |
| | | | interacting ankyrin- | |
| | | | related ADP-ribose | |
| | | | polymerase 2 | |
| ASSAY0234 | Hs00266026_m1 | IGFBP7 | insulin-like growth | GCACCTGCGAGCAAGGTCCTTCCAT |
| | | | factor binding | |
| | | | protein 7 | |
| ASSAY0242 | Hs00276830_m1 | RUNDC2A | RUN domain containing | CAGTGAAACAGTGCCAGATCCGCTT |
| | | | 2A | |
| ASSAY0263 | Hs00606262_g1 | HDAC1 | histone deacetylase 1 | AGGAGAAGAAAGAAGTCACCGAAGA |
| ASSAY0266 | Hs00607689_m1 | FAM103A1 | family with sequence | AGGCAATCGGTTGCAAGACAACAGA |
| | | | similarity 103, | |
| | | | member A1 | |
| ASSAY0281 | Hs00191727_m1 | WTAP | Wilms tumor 1 | CTTCTGCCTGGAGAGGATTCAAGAT |
| | | | associated protein | |
| ASSAY0282 | Hs00192572_m1 | SEL1L | sel-1 suppressor of | CGGGAAACAAACATTCGAGATATGT |
| | | | lin-12-like | |
| | | | (C. elegans) | |
| ASSAY0291 | Hs00195560_m1 | MTHFR | 5,10-methylenetetra- | GTGGCAGGTTACCCCAAAGGCCACC |
| | | | hydrofolate reductase | |
| | | | (NAPDH) | |
| ASSAY0304 | Hs00199030_m1 | EHD1 | EH-domain containing 1 | GGCTGGCCAAGGTTCACGCCTACAT |
| ASSAY0306 | Hs00199344_m1 | ZFHX3 | zinc finger homeobox 3 | AGGGCGGAGCATCGTCCAGCCAAGC |
| ASSAY0324 | Hs00203316_m1 | HOOK2 | hook homolog 2 | AGCGGCGGCAGGTGCAGGAACTGCA |
| | | | (Drosophila) | |
| ASSAY0332 | Hs00205182_m1 | SND1 | staphylococcal | CAGCGAGAGGTGGAGGTGGAGGTGG |
| | | | nuclease and tudor | |
| | | | domain containing 1 | |
| ASSAY0346 | Hs00211420_m1 | FIS1 | fission 1 (mito- | CTGCTCGAGGAGCTGCTGCCCAAAG |
| | | | chondrial outer | |
| | | | membrane) homolog | |
| | | | (S. cerevisiae) | |
| ASSAY0348 | Hs00212451_m1 | CAB39 | calcium binding | GCTCATTGACTTTGAGGGCAAAAAA |
| | | | protein 39 | |
| ASSAY0356 | Hs00214159_m1 | FAM46A | family with sequence | ACTCACGCTCAAGGAAGCTTATGTG |
| | | | similarity 46, | |
| | | | member A | |
| ASSAY0359 | Hs00214745_m1 | DPP8 | dipeptidyl-peptidase 8 | CTGCCTGCTCCAAGTGATTTCAAGT |
| ASSAY0370 | Hs00217272_m1 | NUP133 | nucleoporin 133 kDa | AACTTTTAAAAGATGGCATTCAGCT |
| ASSAY0372 | Hs00218079_m1 | FBXL8 | F-box and leucine- | CACAAAAATCAGTTGCGAATGTGAG |
| | | | rich repeat protein 8 | |
| ASSAY0373 | Hs00218203_m1 | ADAP2 | ArfGAP with dual PH | ACGACTGCCTGGTCTTAAAGGAACA |
| | | | domains 2 | |
| ASSAY0382 | Hs00706913_g1 | PCNP | PEST proteolytic | AATGTAGGCAAACTATCAATTTTTT |
| | | | signal containing | |
| | | | nuclear protein | |
| ASSAY0392 | Hs00287264_m1 | ACSS1 | acyl-CoA synthetase | TGGGGTCAGTGGGAGAGCCCATCAA |
| | | | short-chain family | |
| | | | member 1 | |
| ASSAY0402 | Hs00390635_m1 | TNIK | TRAF2 and NCK | ACCCATCAGAGCAAGCAACCCTGAT |
| | | | interacting kinase | |
| ASSAY0405 | Hs00415453_g1 | TRA@ | T cell receptor | TGGATTCAGTTGGCATGGGTGAGCA |
| | | | alpha locus | |
| ASSAY0407 | Hs00540709_s1 | TMEM203 | transmembrane | CGGGAGCTGGTGCAGTGGCTAGGCT |
| | | | protein 203 | |
| ASSAY0417 | Hs00608534_m1 | SCCPDH | saccharopine dehydro- | CCTAAGGCGGGCGGGGTCTTCACAC |
| | | | genase (putative) | |
| ASSAY0432 | Hs00696974_m1 | BUD31 | BUD31 homolog | GAAAGCCATCAGCAGAGAACTCTAT |
| | | | (S. cerevisiae) | |
| ASSAY0450 | Hs00743508_s1 | C18orf32 | chromosome 18 open | AGGTAGAATTTTGGGAGGTAATAAT |
| | | | reading frame 32 | |
| ASSAY0451 | Hs00745818_s1 | ZNF595 | zinc finger protein | CAAAGCTTTTAATCGGCCCTCAACC |
| | | | 595 | |
| ASSAY0453 | Hs00748530_s1 | UBE2L3 | ubiquitin-conjugating | CTAAGATGCTGCGATCCCGTTCTGC |
| | | | enzyme E2L 3 | |
| ASSAY0455 | Hs00748915_s1 | PFN1 | profilin 1 | TTTTTGGGCCATTACCCCATACCCC |
| ASSAY0456 | Hs00750443_s1 | ARL8B | ADP-ribosylation | GTGTGACTCTGTGGGGACTGCATAG |
| | | | factor-like 8B | |
| ASSAY0464 | Hs00793391_m1 | CSNK1A1 | casein kinase 1, | AGTTTTATGTAAGGGGTTTCCTGCA |
| | | | alpha 1 | |
| ASSAY0467 | Hs00798979_s1 | CCT6A | chaperonin containing | TTTGGGATGTCAGCAGTGGCCTGAA |
| | | | TCP1, subunit 6A | |
| | | | (zeta 1) | |
| ASSAY0476 | Hs00236976_m1 | ITGB1 | integrin, beta 1 | TGTGGCGCGTGCAGGTGCAATGAAG |
| | | | (fibronectin receptor, | |
| | | | beta polypeptide, | |
| | | | antigen CD29 includes | |
| | | | MDF2, MSK12) | |
| ASSAY0477 | Hs00237035_m1 | TRAF3 | TNF receptor- | TCGCGCTGCAGAAACACGAAGACAC |
| | | | associated factor 3 | |
| ASSAY0478 | Hs00237047_m1 | YWHAZ | tyrosine 3-monooxy- | GATAAAAAGAACATCCAGTCATGGA |
| | | | genase/tryptophan 5- | |
| | | | monooxygenase | |
| | | | activation protein, | |
| | | | zeta polypeptide | |
| ASSAY0480 | Hs002442160_m1 | HHEX | hematopoietically | ACCCCCTGGGCAAACCTCTACTCTG |
| | | | expressed homeobox | |
| ASSAY0482 | Hs00242770_m1 | MBD1 | methyl-CpG binding | ATTACCAGAGCCCCACAGGAGACAG |
| | | | domain protein 1 | |
| ASSAY0484 | Hs00244740_m1 | CDC25B | cell division cycle | GGCGGAGCAGACGTTTGAACAGGCC |
| | | | 25 homolog B | |
| | | | (S. pombe) | |
| ASSAY0487 | Hs00248078_m1 | GPR162 | G protein-coupled | AGGATGGAGATGACGATGGGGGCTG |
| | | | receptor 162 | |
| ASSAY0488 | Hs00248163_m1 | GLS | glutaminase | ACTTCTACTTCCAGCTGTGCTCCAT |
| ASSAY0491 | Hs00250236_s1 | KIF21B | kinesin family member | CCCAACATCCATGAGACACCCCGAG |
| | | | 21B | |
| ASSAY0500 | Hs00256558_m1 | WHSC1L1 | Wolf-Hirschhorn | TTACAGAAAGGTGCCAGCGAGATTT |
| | | | syndrome candidate | |
| | | | 1-like 1 | |
| ASSAY0504 | Hs00257861_m1 | COQ10B | coenzyme Q10 homolog | CGCCCGTGCGGAATGGCAGATATTT |
| | | | B (S. cerevisiae) | |
| ASSAY0512 | Hs00260786_m1 | ARFGAP2 | ADP-ribosylation | GTATCCCGAAGCTCTGTCTCCCACT |
| | | | factor GTPase | |
| | | | activating protein 2 | |
| ASSAY0531 | Hs00267008_m1 | IPO5 | importin 5 | TGCTTGCCAGATGTTGGTTTGCTAT |
| ASSAY0540 | Hs00270536_m1 | SNRNP40 | small nuclear | TGAGCCCATCATTATCTCAGCATCG |
| | | | ribonucleoprotein | |
| | | | 40 kDa (U5) | |
| ASSAY0541 | Hs00270620_s1 | IER2 | immediate early | CCCCGCCAAAGTCAGCCGCAAACGA |
| | | | response 2 | |
| ASSAY0543 | Hs00272235_m1 | EIF3M | eukaryotic translation | AGAAGAGTGATGCTGCTTCAAAAGT |
| | | | initiation factor 3, | |
| | | | subunit M | |
| ASSAY0547 | Hs00272902_s1 | RNF113A | ring finger protein | GGGGCCAAGTGCAACCCAGGCAGCC |
| | | | 113A | |
| ASSAY0576 | Hs00326979_m1 | SYNE1 | spectrin repeat | CAAGCTCGAGGCTCTATTATCAGTC |
| | | | containing, nuclear | |
| | | | envelope 1 | |
| ASSAY0579 | Hs00330066_m1 | CCNY | cyclin Y | CCGTCGTCACCCTGGTGTACCTTGA |
| ASSAY0582 | Hs00354853_m1 | CSE1L | CSE1 chromosome | AGGAACTGGAGAATTGTTGAAGATG |
| | | | segregation 1-like | |
| | | | (yeast) | |
| ASSAY0588 | Hs00360923_g1 | CRELD2 | cysteine-rich with | TCCAAGTACGAGTCCAGCGAGATTC |
| | | | EGF-like domains 2 | |
| ASSAY0604 | Hs00369090_m1 | SFRS18 | splicing factor, | ACCAACAGGATCCAAGCCAGATTGA |
| | | | arginine/serine- | |
| | | | rich 18 | |
| ASSAY0619 | Hs00375556_m1 | PIP4K2C | phosphatidylinositol- | CCTTTTCCACAGGGAAAATCTGCCC |
| | | | 5-phosphate 4-kinase, | |
| | | | type II, gamma | |
| ASSAY0632 | Hs00379295_m1 | C1orf144 | chromosome 1 open | AACCCATCCTCGACAGGCCAACCAG |
| | | | reading frame 144 | |
| ASSAY0637 | Hs00383718_m1 | C5AR1 | complement component | AGACCAGAACATGAACTCCTTCAAT |
| | | | 5a receptor 1 | |
| ASSAY0641 | Hs00385203_g1 | FBXW5 | F-box and WD repeat | CCTGTCGCCCGACAACAGGTACCTG |
| | | | domain containing 5 | |
| ASSAY0645 | Hs00387426_m1 | MAP2K4 | mitogen-activated | CAAATAATGGCAGTTAAAAGAATTC |
| | | | protein kinase | |
| | | | kinase 4 | |
| ASSAY0656 | Hs00395045_m1 | STMN3 | stathmin-like 3 | CCAGTACGGGGACATGGAGGTGAAG |
| ASSAY0659 | Hs00400565_m1 | ATG16L2 | ATG16 autophagy | GCTGGTGCCGGCCTATAACCATCTC |
| | | | related 16-like 2 | |
| | | | (S. cerevisiae) | |
| ASSAY0660 | Hs00402617_m1 | MPZL3 | myelin protein zero- | GTGCCTGGATTCAGACTATGAAGAG |
| | | | like 3 | |
| ASSAY0665 | Hs00406064_m1 | DNAJC2 | DnaJ (Hsp40) homolog, | TCAAAGCAGCTCATAAAGCAATGGT |
| | | | subfamily C, member 2 | |
| ASSAY0667 | Hs00409956_g1 | GPS2 | G protein pathway | CTCCGACTCATCCTCTCTGCGCCCC |
| | | | supressor 2 | |
| ASSAY0672 | Hs00412706_m1 | MIA3 | melanoma inhibitory | AGTGAATTTGGATCAGTGGACGGGC |
| | | | activity family, | |
| | | | member 3 | |
| ASSAY0676 | Hs00414732_g1 | LSMD1 | LSM domain | AGCCGTCGGATTCCTTCTCTGCCGG |
| | | | containing 1 | |
| ASSAY0677 | Hs00414889_m1 | ANKRD36B | ankyrin repeat | GAAGGAAAGGACTGCCCTACATTTG |
| | | | domain 36B | |
| ASSAY0678 | Hs00415203_m1 | MARCH3 | membrane-associated | GCCACCCAGAGCCCCTTCAATGACC |
| | | | ring finger (C3HC4) 3 | |
| ASSAY0684 | Hs00417273_m1 | LRRK2 | leucine-rich repeat | TTTGGCCCTCCTCACTGAGACTATT |
| | | | kinase 2 | |
| ASSAY0686 | Hs00418955_m1 | SMCHD1 | structural mainten- | AAGGATTTTAAATGGACAGGAACAG |
| | | | ance of chromosomes | |
| | | | flexible hinge domain | |
| | | | containing 1 | |
| ASSAY0696 | Hs00428204_m1 | NDUFB8; S | NADH dehydrogenase | CGGATGATGGCATGGGGTATGGCGA |
| | | EC31B | (ubiquinone) 1 beta | |
| | | | subcomplex, 8, 19 kDa; | |
| | | | SEC31 homolog B | |
| | | | (S. cerevisiae) | |
| ASSAY0704 | Hs00430663_g1 | UBL5 | ubiquitin-like 5 | CTGGGGGACTATGAAATCCACGATG |
| ASSAY0709 | Hs00536594_m1 | MTG1 | mitochondiral GTPase | CAGCGCTTTGGGTACGTGCAGCACT |
| | | | 1 homolog | |
| | | | (S. cerevisiae) | |
| ASSAY0710 | Hs00536891_m1 | ITSN2 | intersectin 2 | GCTATGAATGGAGGGCCAAACATGT |
| ASSAY0712 | Hs00537038_m1 | TNFAIP8L1 | tumor necrosis factor, | TGCTTCGAGAGTAGGCCATGGACAC |
| | | | alpha-induced protein | |
| | | | 8-like 1 | |
| ASSAY0713 | Hs00538077_m1 | C5orf41 | chromosome 5 open | ACACCCACAGACAGCATCGCACAGA |
| | | | reading frame 41 | |
| ASSAY0714 | Hs00538879_s1 | LUC7L3 | LUC7-like 3 | GTTACACTCAATGCAATTCTCAAGT |
| | | | (S. cerevisiae) | |
| ASSAY0715 | Hs00539341_m1 | C10orf137 | chromosome 10 open | AGACTAGTGAGCAAATCTGTGTCTG |
| | | | reading frame 137 | |
| ASSAY0724 | Hs00542592_g1 | AGER | advanced glycosylation | CGCCGAGGAGAGGAGAGGAAGGCCC |
| | | | end product-specific | |
| | | | receptor | |
| ASSAY0726 | Hs00543883_s1 | HIST1H4C | histone cluster 1, H4c | TATGGCTTCGGCGGCTGAATCTAAG |
| ASSAY0736 | Hs00603727_g1 | EIF1 | eukaryotic translation | TTAAGAAAAAGTTTGCCTGCAATGG |
| | | | initiation factor 1 | |
| ASSAY0741 | Hs00606874_g1 | TNFRSF13C | tumor necrosis factor | CGGAGACAAGGACGCCCCAGAGCCC |
| | | | receptor superfamily, | |
| | | | member 13C | |
| ASSAY0743 | Hs00818252_g1 | KPNA2 | karyopherin alpha 2 | TCATCTTTAGCATGTGGCTACTTAC |
| | | | (RAG cohort 1, | |
| | | | importin alpha 1) | |
| ASSAY0748 | Hs00830558_g1 | FOXN3 | forkhead box N3 | TCTAGGGACTTGGTGTTGCTTGGAA |
| ASSAY0749 | Hs00833126_g1 | MAPK6 | mitogen-activated | CTGAGCCTTGTTGGCAATACTCAGA |
| | | | protein kinase 6 | |
| ASSAY0753 | Hs00855332_g1 | LDHA | lactate dehydrogenase | TCTGACGCACCACTGCCAATGCTGT |
| | | | A | |
| ASSAY0780 | Hs00942554_m1 | RPL6 | ribosomal protein L6 | TCTTGCAAGATGGCGGGTGAAAAAG |
| ASSAY0797 | Hs00975865_m1 | BTK | Bruton | TTATCCCTTCCAGGTTGTATATGAT |
| | | | agammaglobulinemia | |
| | | | tyrosine kinase | |
| ASSAY0802 | Hs00989184_m1 | GZMA | granzyme A (granzyme | ACTCGTGCAATGGAGATTCTGGAAG |
| | | | 1, cytotoxic T- | |
| | | | lymphocyte-associated | |
| | | | serine esterase 3) | |
| ASSAY0807 | Hs00998133_m1 | TGFB1 | transforming growth | ACAGCAAGGTCCTGGCCCTGTACAA |
| | | | factor, beta 1 | |
| ASSAY0810 | Hs01007839_m1 | TNPO1 | transportin 1 | GAAGCTGCCTGCAGTGCCTTTGCTA |
| ASSAY0814 | Hs01013056_g1 | GLUL | glutamate-ammonia | TCTGAAGTACATCGAGGAGGCCATT |
| | | | ligase (glutamine | |
| | | | synthetase) | |
| ASSAY0818 | Hs01018736_g1 | UBL3 | ubiquitin-like 3 | GCCAAACTCTCAAGGTCAGAGGAAT |
| ASSAY0819 | Hs01030693_m1 | ARHGAP17 | Rho GTPase activating | CCAAGATAGTAACAGACTCCAATTC |
| | | | protein 17 | |
| ASSAY0820 | Hs01031740_m1 | ARPC2 | actin releated protein | TGAAAACAATCACGGGGAAGACGTT |
| | | | ⅔ complex, subunit | |
| | | | 2, 34 kDa | |
| ASSAY0827 | Hs01037385_s1 | HMGB1 | high-mobility group | AAAGCAAAGGGAGGATAAAACAGTA |
| | | | box 1 | |
| ASSAY0834 | Hs01053201_s1 | ZBTB38 | zinc finger and BTB | GTAATAAGCTGTGTGACGGTCTTTA |
| | | | domain containing 38 | |
| ASSAY0836 | Hs01053867_s1 | NCRNA00203 | non-protein coding | AGCGCCAGTGCTGGCATGGGCTTTC |
| | | | RNA 203 | |
| ASSAY0844 | Hs01064792_m1 | TRANK1 | tetratricopeptide | TAAAGAAGGAAGGTATTGTTCAGGA |
| | | | repeat and ankyrin | |
| | | | repeat containing 1 | |
| ASSAY0854 | Hs01082775_m1 | TFAM | transcription factor | GGTGATTCACCGCAGGAAAAGCTGA |
| | | | A, mitochondrial | |
| ASSAY0856 | Hs01085351_m1 | STK39 | serine threonine | TAAGTTGGCTTCTGGCTGTGATGGG |
| | | | kinase 39 (STE20/SPS1 | |
| | | | homolog, yeast) | |
| ASSAY0858 | Hs01087966_m1 | MEG3 | maternally expressed 3 | GGATCCCTCACCCGGGTCTCTCCTC |
| | | | (non-protein coding) | |
| ASSAY0871 | Hs01114250_m1 | TGFBR3 | transforming growth | TCTATTCTCACACAGGGGAGACAGC |
| | | | factor, beta receptor | |
| | | | III | |
| ASSAY0888 | Hs01577197_m1 | PSEN2 | presenilin 2 | CCTCATTGGCTTGTGTCTGACCCTC |
| | | | (Alzheimer disease 4) | |
| ASSAY0900 | Hs01636043_s1 | SRP9 | signal recognition | TGCTGTTGTGACCAATAAATATAAA |
| | | | particle 9 kDa | |
| ASSAY0916 | Hs02339727_m1 | ZNF708 | zinc finger protein | CAAACCCCCAGCTATGTGTTCTCAT |
| | | | 708 | |
| ASSAY0923 | Hs02621508_s1 | TNFAIP8 | tumor necrosis factor, | AAATACAGATGTCTCCAGACCTGAG |
| | | | alpha-induced protein | |
| | | | 8 | |
| ASSAY0959 | Hs00185574_m1 | EZR | ezrin | AAAATGCCGAAACCAATCAATGTCC |
| ASSAY0962 | Hs00211306_m1 | DHRS7 | dehydrogenase/reduct- | CTTTAAGAGTGGTGTGGATGCAGAC |
| | | | ase (SDR family) | |
| | | | member 7 | |
| ASSAY0966 | Hs00323799_m1 | RNF160 | ring finger protein | TGAAAAGGCATGTCCTAGTTCAGAT |
| | | | 160 | |
| ASSAY0988 | Hs00200446_m1 | SUPT16H | supressor of Ty 16 | AGGAAATTACATACCGAGCATCAAA |
| | | | homolog | |
| | | | (S. cerevisiae) | |
| ASSAY0996 | Hs00369838_s1 | GPR82 | G protein-coupled | ATGGGAATATCAATCTGCTCAATGC |
| | | | receptor 82 | |
| ASSAY1000 | Hs00403541_m1 | FAM129C | family with sequence | CTGCCCTGAATCCTTGGGAGACCAT |
| | | | similarity 129, | |
| | | | member C | |
| ASSAY1066 | Hs00544818_m1 | MS4A1 | membrane-spanning | TCTCTGTTCTTGGGCATTTTGTCAG |
| | | | 4-domains, subfamily | |
| | | | A, member 1 | |
| ASSAY1071 | Hs00358603_g1 | APOL1 | apolipoprotein L, 1 | AGGAAGCTGGAGCGAGGGTGCAACA |
| ASSAY1087 | Hs00360928_m1 | CRELD2 | cysteine-rich with | GTGCGAAGATGTGGACGAGTGCTCA |
| | | | EFD-like domains 2 | |
| ASSAY1095 | Hs00559595_m1 | ITGB1 | integrin, beta 1 | TTGCTCAAACAGATGAAAATAGATG |
| | | | (fibronectin receptor, | |
| | | | beta polypeptide, | |
| | | | antigen CD29 includes | |
| | | | MDF2, MSK12) | |

TABLE 8
Informative probes for Very Mild versus Mild dementia
(All probes have p-value <0.5)

| Sequence No. | | Gene | | Context Sequence |
|---|---|---|---|---|
| (DiaGenic Assay ID) | Assay ID | Symbol | Gene name | (Oligonucleotide sequence) |
| ASSAY0011 | Hs99999905_m1 | GAPDH | glyceraldehyde-3- | GGGCGCCTGGTCACCAGGGCTGCTT |
| | | | phosphate dehydrogenase | |
| ASSAY0022 | Hs00190463_m1 | C21orf33 | chromosome 21 open | GGGAAGCCCATCGGCTTGTGCTGCA |
| | | | reading frame 33 | |
| ASSAY0047 | Hs00220301_m1 | PPAN; | peter pan homolog | ATCAACGTGCACAAGGTGAACCTGA |
| | | PPAN- | (Drosophila); PPAN- | |
| | | P2RY11 | P2RY11 readthrough | |
| ASSAY0051 | Hs00220527_m1 | C1orf128 | chromosome 1 open | CCCTCTGAGATGAGACTGTACAAGA |
| | | | reading frame 128 | |
| ASSAY0052 | Hs00220814_m1 | SLC44A2 | solute carrier family | AAACGAGAACAAACCCTATCTGTTT |
| | | | 44, member 2 | |
| ASSAY0057 | Hs00221859_m1 | SQRDL | sulfide quinone | GTTGAGCCCAGTGAGAGACATTTCT |
| | | | reductase-like (yeast) | |
| ASSAY0062 | Hs00223727_m1 | PAPD5 | PAP associated | TTTACAACCAGGTAACGATGTTGGA |
| | | | domain containing 5 | |
| ASSAY0082 | Hs00228787_m1 | COASY | Coenzyme A synthase | AAAGATCTGTTGAAGAGCAAGTTGC |
| ASSAY0113 | Hs00157831_m1 | GTF2E2 | general transcription | GCCCTTCTCACTCAGCATTATGGAT |
| | | | factor IIE, polypeptide | |
| | | | 2, beta 34 kDa | |
| ASSAY0137 | Hs99999908_m1 | GUSB | glucuronidase, beta | TGAACAGTCACCGACGAGAGTGCTG |
| ASSAY0150 | Hs00174705_m1 | CD163 | CD163 molecule | ACCTGCTCAGCCCACAGGGAACCCA |
| ASSAY0172 | Hs00182671_m1 | NAE1 | NEDD8 activating | GACCGGCAGCTGAGGTTGTGGGGTG |
| | | | enzyme E1 subunit 1 | |
| ASSAY0185 | Hs00189530_m1 | FRG1; | FSHD region gene 1; | TTCAAAATGGGAAAATGGCTTTGTT |
| | | FRG1B | FSHD region gene 1 | |
| | | | family, member B | |
| ASSAY0187 | Hs00189576_m1 | HSD17B10 | hydroxysteroid (17- | CGCCCCAGCCGACGTGACCTCTGAG |
| | | | beta) dehydrogenase 10 | |
| ASSAY0205 | Hs00188277_m1 | KDM5C | lysine (K)-specific | CCACCCGCGGACTGGCAGCCACCCT |
| | | | demethylase 5C | |
| ASSAY0209 | Hs00200082_m1 | UBL3 | ubiquitin-like 3 | CAATTGGCCAATGGACTGGGAAGAA |
| ASSAY0212 | Hs00204260_m1 | C11orf21 | chromosome 11 open | GAGGAGGAGCGCTGTGCCCAGGTGG |
| | | | reading frame 21 | |
| ASSAY0224 | Hs00218060_m1 | TMEM106B | transmembrane | GCGCCCCGCGTGCCGACATGGGAAA |
| | | | protein 106B | |
| ASSAY0261 | Hs00429212_m1 | C16orf35 | chromosome 16 open | GCTGTGCAGGAGACCCAGCTCATCC |
| | | | reading frame 35 | |
| ASSAY0279 | Hs01585413_g1 | N/A | N/A | TTTACCAAATTCAAGGTGGATGAAT |
| ASSAY0285 | Hs00194072_m1 | APBA2 | amyloid beta (A4) | AACATTCCAGAGACAAAGAAGGTGG |
| | | | precursor protein- | |
| | | | binding, family A, | |
| | | | member 2 | |
| ASSAY0289 | Hs00194815_m1 | ARPC1B | actin releated protein | CGCGGGAGGAGCCAAGCCGCCATGG |
| | | | ⅔ complex, subunit | |
| | | | 1B, 41 kDa | |
| ASSAY0304 | Hs00199030_m1 | EHD1 | EH-domain containing 1 | GGCTGGCCAAGGTTCACGCCTACAT |
| ASSAY0306 | Hs00199344_m1 | ZFHX3 | zinc finger homeobox 3 | AGGGCGGAGCATCGTCCAGCCAAGC |
| ASSAY0307 | Hs00199894_m1 | CD160 | CD160 molecule | GGCCCTTCAAGCTTTGTAAGCCTTG |
| ASSAY0327 | Hs00203782_m1 | BAZ2A | bromodomain adjacent | AGAAACTGGAGGCCCAAGAAACATT |
| | | | to zinc finger domain, | |
| | | | 2A | |
| ASSAY0346 | Hs00211420_m1 | FIS1 | fission 1 (mitochon- | CTGCTCGAGGAGCTGCTGCCCAAAG |
| | | | drial outer membrane) | |
| | | | homolog (S. cerevisiae) | |
| ASSAY0372 | Hs00218079_m1 | FBXL8 | F-box and leucine-rich | CACAAAAATCAGTTGCGAATGTGAG |
| | | | repeat protein 8 | |
| ASSAY0399 | Hs00377979_m1 | TRIP6 | thyroid hormone | GGACTTTCACAGGAAGTTTGCCCCA |
| | | | receptor interactor 6 | |
| ASSAY0422 | Hs00610210_g1 | RHBDL1 | rhomboid, veinlet-like | TCTTGCCCAGATCATCGTGTTCCTG |
| | | | 1 (Drosophila) | |
| ASSAY0428 | Hs00610917_g1 | AURKAIP1 | aurora kinase A | CTGAGACGCAAGCAGATCAAGTTCG |
| | | | interacting protein 1 | |
| ASSAY0456 | Hs00750443_s1 | ARL8B | ADP-ribosylation | GTGTGACTCTGTGGGGACTGCATAG |
| | | | factor-like 8B | |
| ASSAY0458 | Hs00751057_s1 | GOT2 | glutamic-oxaloacetic | GCTGATGCCGTACCCTCACCCTTTT |
| | | | transaminase 2, mito- | |
| | | | chondrial (aspartate | |
| | | | aminotransferase 2) | |
| ASSAY0463 | Hs00762481_s1 | RLP36 | ribosomal protein L36 | CCTTCTCCCCGTCGCTGTCCGCAGC |
| ASSAY0467 | Hs00798979_s1 | CCT6A | chaperonin containing | TTTGGGATGTCAGCAGTGGCCTGAA |
| | | | TCP1, subunit 6A | |
| | | | (zeta 1) | |
| ASSAY0481 | Hs00242737_m1 | LTB | lymphotoxin beta (TNF | ATCAGGGAGGACTGGTAACGGAGAC |
| | | | superfamily, member 3) | |
| ASSAY0489 | Hs00248408_m1 | Sep6 | septin 6 | AGAAAGAGCTGCACGAGAAGTTTGA |
| ASSAY0502 | Hs00257171_s1 | GALNT10 | UDP-N-acetyl-alpha-D- | AGATTCTGCACAAGTCAGCAGTGCA |
| | | | galactosamine-polypep- | |
| | | | tide N-acetylgalacto- | |
| | | | saminyltransferase 10 | |
| | | | (GalNAc-T10) | |
| ASSAY0507 | Hs00258828_m1 | FERMT3 | fermitin family homolog | GGATCCCAAGACAGACCCCGTGCGG |
| | | | 3 (Drosophila) | |
| ASSAY0511 | Hs00260613_m1 | VPS25 | vacuolar protein | GAGGATGAGGAGTTCCACGGGCTGG |
| | | | sorting 25 homolog | |
| | | | (S. cerevisiae) | |
| ASSAY0532 | Hs00267168_s1 | MC1R | melanocortin 1 | GCAGGACGCTCAAGGAGGTGCTGAC |
| | | | receptor (alpha | |
| | | | melanocyte stimulating | |
| | | | hormone receptor) | |
| ASSAY0537 | Hs00269247_s1 | GPR65 | G protein-coupled | TTCTCTCCTGCCTTGTGCAAAGGGA |
| | | | receptor 65 | |
| ASSAY0542 | Hs00271244_s1 | HSPA1B; | heat shock 70 kDa | AGGACTTTGCTGCTGTTTTCCTATG |
| | | HSPA1A | protein 1; heat shock | |
| | | | 70 kDa protein 1A | |
| ASSAY0547 | Hs00272902_s1 | RFN113A | ring finger protein | GGGGCCAAGTGCAACCCAGGCAGCC |
| | | | 113A | |
| ASSAY0553 | Hs00275656_m1 | GSK3B | glycogen synthase | AGAAATAATCAAGGTCCTGGGAACT |
| | | | kinase 3 beta | |
| ASSAY0570 | Hs00299189_m1 | RLP32P3 | ribosomal protein L32 | AAGGAAGAGGACCAGGCTTCCTGTC |
| | | | pseudogene 3 | |
| ASSAY0584 | Hs00356601_m1 | CCR2 | chemokine (C-C motif) | GCCACAAGCTGAACAGAGAAAGTGG |
| | | | receptor 2 | |
| ASSAY0615 | Hs00375047_m1 | TMED9 | transmembrane emp24 | CCCAGAGGACAAGGTCATCCTGGCC |
| | | | protein transport | |
| | | | domain containing 9 | |
| ASSAY0619 | Hs00375556_m1 | PIP4K2C | phosphatidylinositol-5- | CCTTTTCCACAGGGAAAATCTGCCC |
| | | | phosphate 4-kinase, | |
| | | | type II, gamma | |
| ASSAY0621 | Hs00375641_m1 | TOMM40L | translocase of outer | GCTCAGTCCCACTGAGGTGTTCCCC |
| | | | mitochondrial membrane | |
| | | | 40 homolog (yeast)- | |
| | | | like | |
| ASSAY0634 | Hs00379889_m1 | PQLC3 | PQ loop repeat | GACCTGGCCATGAATCTATGTACTT |
| | | | containing 3 | |
| ASSAY0641 | Hs00385203_g1 | FBXW5 | F-box and WD repeat | CCTGTCGCCCGACAACAGGTACCTG |
| | | | domain containing 5 | |
| ASSAY0667 | Hs00409956_g1 | GPS2 | G protein pathway | CTCCGACTCATCCTCTCTGCGCCCC |
| | | | suppressor 2 | |
| ASSAY0676 | Hs00414732_g1 | LSMD1 | LSM domain containing 1 | AGCCGTCGGATTCCTTCTCTGCCGG |
| ASSAY0678 | Hs00415203_m1 | MARCH3 | membrane-associated | GCCACCCAGAGCCCCTTCAATGACC |
| | | | ring finger (C3HC4) 3 | |
| ASSAY0682 | Hs00416940_m1 | INSC | inscuteable homolog | TGGCCTGCCTGGCTGCTCTGCGTAG |
| | | | (Drosophila) | |
| ASSAY0683 | Hs00417251_m1 | SNHG6 | small nucleolar RNA | TAGCTGGGCTCTGCGAGGTGCAAGA |
| | | | host gene 6 (non- | |
| | | | protein coding) | |
| ASSAY0729 | Hs00559804_m1 | CAPN1 | calpain 1, (mu/l) large | AAACTACCCAGCCACCTTCTGGGTG |
| | | | subunit | |
| ASSAY0741 | Hs00606874_g1 | TNFRSF13C | tumor necrosis factor | CGGAGACAAGGACGCCCCAGAGCCC |
| | | | receptor superfamily, | |
| | | | member 13C | |
| ASSAY0743 | Hs00818252_g1 | KPNA2 | karyopherin alpha 2 | TCATCTTTAGCATGTGGCTACTTAC |
| | | | (RAG cohort 1, | |
| | | | importin alpha 1) | |
| ASSAY0751 | Hs00852410_g1 | PRKRIR | protein-kinase, | TACTCTGCAGTGCAGTGTCAGATTT |
| | | | interferon-inducible | |
| | | | double stranded RNA | |
| | | | dependent inhibitor, | |
| | | | repressor of (P58 | |
| | | | repressor) | |
| ASSAY0753 | Hs00855332_g1 | LDHA | lactate dehydrogenase | TCTGACGCACCACTGCCAATGCTGT |
| | | | A | |
| ASSAY0797 | Hs00975865_m1 | BTK | Bruton | TTATCCCTTCCAGGTTGTATATGAT |
| | | | agammaglobulinemia | |
| | | | tyrosine kinase | |
| ASSAY0804 | Hs00989762_g1 | CIRBP | cold inducible RNA | CTATAGCAGCCGGAGTCAGAGTGGT |
| | | | binding protein | |
| ASSAY0814 | Hs01013056_g1 | GLUL | glutamate-ammonia | TCTGAAGTACATCGAGGAGGCCATT |
| | | | ligase (glutamine | |
| | | | synthetase) | |
| ASSAY0820 | Hs01031740_m1 | ARPC2 | actin related protein | TGAAAACAATCACGGGGAAGACGTT |
| | | | ⅔ complex, subunit 2, | |
| | | | 34 kDa | |
| ASSAY0826 | Hs01036536_m1 | BCR | breakpoint cluster | ATTGCTGTGGTCACCAAGAGAGAGA |
| | | | region | |
| ASSAY0836 | Hs01053867_s1 | NCRNA002 | non-protein coding | AGCGCCAGTGCTGGCATGGGCTTTC |
| | | 03 | RNA 203 | |
| ASSAY0844 | Hs01064792_m1 | TRANK1 | tetratricopeptide | TAAAGAAGGAAGGTATTGTTCAGGA |
| | | | repeat and ankyrin | |
| | | | repeat containing 1 | |
| ASSAY0856 | Hs01085351_m1 | STK39 | serine threonine | TAAGTTGGCTTCTGGCTGTGATGGG |
| | | | kinase 39 (STE20/SPS1 | |
| | | | homolog, yeast) | |
| ASSAY0871 | Hs01114250_m1 | TGFBR3 | transforming growth | TCTATTCTCACACAGGGGAGACAGC |
| | | | factor, beta receptor | |
| | | | III | |
| ASSAY0888 | Hs01577197_m1 | PSEN2 | presenilin 2 | CCTCATTGGCTTGTGTCTGACCCTC |
| | | | (Alzheimer disease 4) | |
| ASSAY0914 | Hs02339116_s1 | OR52K1 | olfactory receptor, | GGCAGTTCTCCAGCTTGCCTCTCAG |
| | | | family 52, subfamily K, | |
| | | | member 1 | |
| ASSAY0916 | Hs02339727_m1 | ZNF708 | zinc finger protein 708 | CAAACCCCCAGCTATGTGTTCTCAT |
| ASSAY0925 | Hs02863396_m1 | GNA12 | guanine nucleotide | AGCGAGTTTCAGCTGGGGGAGTCGG |
| | | | binding protein (G | |
| | | | protein) alpha 12 | |
| ASSAY0941 | Hs00328784_s1 | MTMR3 | myotubularin related | CCCTCGGGAAGGTTGGTATTGAGGG |
| | | | protein 3 | |
| ASSAY0947 | Hs00254569_s1 | HRH2 | histamine receptor H2 | GGTCACCCCAGTTCGGGTCGCCATC |
| ASSAY0976 | Hs00376366_m1 | CCDC12 | coiled-coil domain | CAAACCGGTTGCAGTGGAGGAGAAG |
| | | | containing 12 | |
| ASSAY1014 | Hs00204129_m1 | C13orf15 | chromosome 13 open | TCGGAGAGTGCAGATTCACTTTATA |
| | | | reading frame 15 | |
| ASSAY1023 | Hs01573555_m1 | ITPR3 | inositol 1,4,5- | GCTTCATCTGTGGTCTGGAGAGGGA |
| | | | triphosphate receptor | |
| | | | type 3 | |
| ASSAY1026 | Hs00162271_m1 | SPTBN1 | spectrin, beta, non- | GCTCTGGGCACACAGGTGAGGCAGC |
| | | | erythrocytic 1 | |
| ASSAY1035 | Hs00202392_m1 | SLC39A6 | solute carrier family | CGGAGACGAAGGCGCAATGGCGAGG |
| | | | 39 (zinc transporter), | |
| | | | member 6 | |

TABLE 9
Informative probes for Prospective modelling
(non-clear versus clear progression of AD)

| Sequence No. | | Gene | | Context Sequence |
|---|---|---|---|---|
| (DiaGenic Assay ID) | Assay ID | Symbol | Gene name | (Oligonucleotide sequence) |
| ASSAY0001 | Hs00152932_m1 | TLR2 | toll-like receptor 2 | TCAACTGGTAGTTGTGGGTTGAAGC |
| ASSAY0002* | Hs00153510_m1 | MME | membrane metallo- | TGAAGAAAAGGCCTTAGCAATTAAA |
| | | | endopeptidase | |
| ASSAY0003* | Hs00190079_m1 | PFKFB3 | 6-phosphofructo-2- | TGCCCAGATCCTGTGGGCCAAAGCT |
| | | | kinase/fructose-2,6- | |
| | | | biphosphatase 3 | |
| ASSAY0006* | Hs00220373_m1 | SLC12A9 | solute carrier family | CTCCGGCCTCGGTGGCATGAAGCCC |
| | | | 12 (potassium/chloride | |
| | | | transporters), member 9 | |
| ASSAY0013* | Hs00163311_m1 | UBE2B | ubiquitin-conjugating | CACCTTTTGAAGATGGTACTTTTAA |
| | | | enzyme E2B (RAD6 | |
| | | | homolog) | |
| ASSAY0017* | Hs00179345_m1 | MAP4K1 | mitogen-activated | CTCTCTCAGGAAAGACCCCCCACCT |
| | | | protein kinase kinase | |
| | | | kinase kinase 1 | |
| ASSAY0018 | Hs00185876_m1 | ACOX3 | acyl-Coenzyme A | ATCTGGCCATGAACCGGTTGGGTGT |
| | | | oxidase 3, pristanoyl | |
| ASSAY0022* | Hs00190463_m1 | C21orf33 | chromosome 21 open | GGGAAGCCCATCGGCTTGTGCTGCA |
| | | | reading frame 33 | |
| ASSAY0024 | Hs00191108_m1 | SFRS11 | splicing factor, | CCGCCGGATGATTCGCCTTTGCCAG |
| | | | arginine/serine-rich 11 | |
| ASSAY0027* | Hs00191312_m1 | NMT2 | N-myristoyltransferase | TTCGGATTTATGACAGTGTGAAGAA |
| | | | 2 | |
| ASSAY0031 | Hs00198312_m1 | AHCYL1 | adenosylhomocysteinase- | AGCTACAGTTCAGCTGCATCCTACA |
| | | | like 1 | |
| ASSAY0036 | Hs00217597_m1 | PSPC1 | paraspeckle component 1 | ACATGGAAAATGGTGATAAAAGAAA |
| ASSAY0040* | Hs00219196_m1 | YIPF1 | Yip1 domain family, | TGGGCTGCTTGGCATACTTTTTTGA |
| | | | member 1 | |
| ASSAY0041* | Hs00219523_m1 | C1orf183 | chromosome 1 open | TCAAACAGGAGCTGATGTCCATGAA |
| | | | reading frame 183 | |
| ASSAY0047* | Hs00220301_m1 | PPAN; PPA | peter pan homolog | ATCAACGTGCACAAGGTGAACCTGA |
| | | N-P2TY11 | (Drosophila); PPAN- | |
| | | | P2RY11 readthrough | |
| ASSAY0049* | Hs00220491_m1 | ENTPD7 | ectonucleoside | CAAGGCTGCTCAGGATTACTGTGGC |
| | | | triphosphate | |
| | | | diphosphohydrolase 7 | |
| ASSAY0050 | Hs00220503_m1 | CASS4 | Cas scaffolding protein | TGCGCCCAAGGCACTCCTGGCCAGG |
| | | | family member 4 | |
| ASSAY0053* | Hs00221104_m1 | ABHD6 | abhydrolase domain | CGTGTGTCCTGCTGGCCTGCAGTAC |
| | | | containing 6 | |
| ASSAY0054 | Hs00221227_m1 | PLEKHA4 | pleckstrin homology | TCTCCCCAGGACAGAGTGTCTGCTC |
| | | | domain containing, | |
| | | | family A (phosphoino- | |
| | | | sitide binding | |
| | | | specific) member 4 | |
| ASSAY0055* | Hs00221499_m1 | KAT2A | K(lysine) | TCACTTCCCCAAATTCCTGTCCATG |
| | | | acetyltransferase 2A | |
| ASSAY0057* | Hs00221859_m1 | SQRDL | sulfide quinone | GTTGAGCCCAGTGAGAGACATTTCT |
| | | | reductase-like (yeast) | |
| ASSAY0061 | Hs00223525_m1 | ERAP2 | endoplasmic reticulum | AGCTAGTTGGTGCAGGGAGACTGAC |
| | | | aminopeptidase 2 | |
| ASSAY0065 | Hs00224328_m1 | CRTC3 | CREB regulated trans- | TACCTCCCAGATGGTGTCCTCAGAC |
| | | | cription coactivator 3 | |
| ASSAY0070 | Hs00225747_m1 | NOTCH2 | Nothc homolog 2 | GTGCCTTTACTGGCCGGCACTGTGA |
| | | | (Drosophila) | |
| ASSAY0080 | Hs00228549_m1 | SIK3 | SIK family kinase 3 | CCCAGCAGAGAGCCTGTCATAGGGA |
| ASSAY0085 | Hs00229911_m1 | APH1B | anterior pharynx | TCATCGCCGGAGCTTTCTTCTGGTT |
| | | | defective 1 homolog B | |
| | | | (C. elegans) | |
| ASSAY0089* | Hs00231324_m1 | SMARCA4 | SWI/SNF related, matrix | GAATCCTCACCAGGACCTGCAAGCG |
| | | | associated, actin | |
| | | | dependent regulator of | |
| | | | chromatin, subfamily a, | |
| | | | member 4 | |
| ASSAY0093 | Hs00233856_m1 | LRP1 | low density lipoprotein | CCCCTGAGATTTGTCCACAGAGTAA |
| | | | receptor-related | |
| | | | protein 1 | |
| ASSAY0096* | Hs00234224_m1 | ADAM17 | ADAM metallopeptidase | GGTGTCCAGTGCAGTGACAGGAACA |
| | | | domain 17 | |
| ASSAY0097* | Hs00234280_m1 | UBE2D1 | ubiquitin-conjugating | GAGGATTCAGAAAGAATTGAGTGAT |
| | | | enzyme E2D 1 (UBC4/5 | |
| | | | homolog, yeast) | |
| ASSAY0098* | Hs00153519_m1 | MME | membrane metallo- | TCCAGGCAATTTCAGGATTATTGGG |
| | | | endopeptidase | |
| ASSAY0108 | Hs00156251_m1 | CAPN2 | calpain 2, (m/ll) | GAAGCGCCCCACGGAGATCTGCGCT |
| | | | large subunit | |
| ASSAY0112 | Hs00157403_m1 | EPHX2 | epoxide hydrolase 2, | ACGTGACAGTAAAGCCCAGGGTCCG |
| | | | cytoplasmic | |
| ASSAY0115* | Hs00158057_m1 | IL1RAP | interleukin 1 receptor | AACCATTTTAGATGGAAAAGAGTAT |
| | | | accessory protein | |
| ASSAY0119* | Hs00159537_m1 | NBN | nibrin | CCCGGCAGGAGGAGAACCATACAGA |
| ASSAY0120* | Hs00159668_m1 | NRD1 | nardilysin (N-arginine | TGTCACAAGCACAGAATCTATGGAT |
| | | | dibasic convertase) | |
| ASSAY0127* | Hs00162394_m1 | STIM1 | stromal interaction | TTGTCCATGCAGTCCCCTAGCCTGC |
| | | | molecule 1 | |
| ASSAY0132* | Hs00166580_m1 | UBE3A | ubiquitin protein | CTAGCCGAATGAAGCGAGCAGCTGC |
| | | | ligase E3A | |
| ASSAY0133* | Hs00167309_m1 | SOD2 | superoxide dismutase | GGAACAACAGGCCTTATTCCACTGC |
| | | | 2, mitochondrial | |
| ASSAY0136* | Hs00170600_m1 | DNAJA3 | DnaJ (Hsp40) homolog, | TCAACGTGACGATCCCCCCTGGGAC |
| | | | subfamily A, member 3 | |
| ASSAY0137* | Hs99999908_m1 | GUSB | glucuronidase, beta | TGAACAGTCACCGACGAGAGTGCTG |
| ASSAY0145 | Hs00174164_m1 | CSF1 | colony stimulating | AGAGCATGACAAGGCCTGCGTCCGA |
| | | | factor 1 (macrophage) | |
| ASSAY0150 | Hs00174705_m1 | CD163 | CD163 molecule | ACCTGCTCAGCCCACAGGGAACCCA |
| ASSAY0154* | Hs00175407_m1 | CTSS | cathespin S | TGTGAAAAACAGCTGGGGCCACAAC |
| ASSAY0156* | Hs00175573_m1 | AQP9 | aquaporin 9 | CATCTTGATTGTCCTTGGATGTGGC |
| ASSAY0157* | Hs00175591_m1 | PRNP | prion protein | CACGACCGAGGCAGAGCAGTCATTA |
| ASSAY0158* | Hs00176666_m1 | ITPKB | inositol 1,4,5- | GCAAGATGGGAATCAGGACCTACCT |
| | | | triphosphate 3-kinase B | |
| ASSAY0162* | Hs00177028_m1 | PKN1 | protein kinase N1 | TGGCAGCACCAAGGACCGGAAGCTG |
| ASSAY0163* | Hs00177066_m1 | MAPK1 | mitogen-activated | CGGCATGGTGTGCTCTGCTTATGAT |
| | | | protein kinase 1 | |
| ASSAY0166 | Hs00178787_m1 | CDC42BPB | CDC42 binding protein | CTGTCGCCTGTAGTTGCAGCCCCAC |
| | | | kinase beta (DMPK-like) | |
| ASSAY0169* | Hs00179997_m1 | KDSR | 3-ketodihydrosphingo- | GCTCCAGCAGGTGGTCACCATGGGC |
| | | | sine reductase | |
| ASSAY0170 | Hs00180965_m1 | ERBB2IP | erbb2 interacting | GCCGAAAGAATGTTGGCTCAATTAA |
| | | | protein | |
| ASSAY0180 | Hs00187845_m1 | BCL2A1 | BCL2-related protein A1 | AAAACGGAGGCTGGGAAAATGGCTT |
| ASSAY0182 | Hs00188433_m1 | FIBP | fibroblast growth | TGACCGGTTGGCCAGGGACTATGCA |
| | | | factor (acidic) intra- | |
| | | | cellular binding | |
| | | | protein | |
| ASSAY0183 | Hs00188713_m1 | BAG3 | BCL2-associated | GGGCCCCAAGGAGACTCCATCCTCT |
| | | | athanogene 3 | |
| ASSAY0190 | Hs00154457_m1 | CIRBP | cold inducible RNA | GCCCGACTCAGTGGCCGCCATGGCA |
| | | | binding protein | |
| ASSAY0191 | Hs00157817_m1 | GRB2 | growth factor receptor- | GGGGGGACATCCTCAAGGTTTTGAA |
| | | | bound protein 2 | |
| ASSAY0194* | Hs00164370_m1 | CYBA | cytochrome b-245, | GGCCTGATCCTCATCACCGGGGGCA |
| | | | alpha polypeptide | |
| ASSAY0197 | Hs00170953_m1 | S100A6 | S100 calcium binding | CCCTACCGCTCCAAGCCCAGCCCTC |
| | | | protein A6 | |
| ASSAY0199 | Hs00175295_m1 | TCF12 | transcription factor 12 | GCGCTTGATCCCTTGCAAGCAAAAA |
| ASSAY0203* | Hs00183479_m1 | PDE4A | phosphodiesterase 4A, | CCTGGCCCAAGAACTGGAGAACCTG |
| | | | cAMP-specific | |
| | | | (phosphodiesterase E2 | |
| | | | dunce homolog, | |
| | | | Drosophila) | |
| ASSAY0204* | Hs00184390_m1 | TCOF1 | Treacher Collins- | GCATCTCCAGCACAGGTGAAAACCT |
| | | | Franceschetti | |
| | | | syndrome 1 | |
| ASSAY0210 | Hs00203291_m1 | CCDC106 | coiled-coil domain | CTCGGATGGAGGCAGAGGACCACTG |
| | | | containing 106 | |
| ASSAY0213* | Hs00204880_m1 | PATZ1 | POZ (BTB) and AT | ACAAGTGTCAGACCTGCAATGCTTC |
| | | | hook containing zinc | |
| | | | finger 1 | |
| ASSAY0214* | Hs00207230_m1 | FAM38A | family with sequence | CGGCCCTGTGCATTGATTATCCCTG |
| | | | similarity 38, | |
| | | | member A | |
| ASSAY0215* | Hs00208212_m1 | RBM19 | RNA binding motif | ACGAGCCACTAAGCCAGCCGTGACA |
| | | | protein 19 | |
| ASSAY0218 | Hs00212288_m1 | BIRC6 | baculoviral IAP repeat- | GCGAATGCATTCAGGAGCAAGAAGA |
| | | | containing 6 (apollon) | |
| ASSAY0223 | Hs00215938_m1 | RNF31 | ring finger protein 31 | TGCCCCACAACCGGATGCAGGCCCT |
| ASSAY0227* | Hs00222984_m1 | HPS4 | Hermansky-Pudlak | CATAGAGGAAGTGTACCACAGCAGC |
| | | | syndrome 4 | |
| ASSAY0228* | Hs00227687_m1 | DENND2D | DENN/MADD domain | TGGAAGAGGTCCTGCTGGTCAATCT |
| | | | containing 2D | |
| ASSAY0232 | Hs00255879_m1 | GFOD1 | glucose-fructose | AAACCCTAGGCATCGGCAAGAACGT |
| | | | oxidereductase domain | |
| | | | containing 1 | |
| ASSAY0242 | Hs00276830_m1 | RUNDC2A | RUN domain | CAGTGAAACAGTGCCAGATCCGCTT |
| | | | containing 2A | |
| ASSAY0246 | Hs00330168_m1 | DNHD1 | dynein heavy chain | GGGCGCTGGAGTCAAGTGACTCTAA |
| | | | domain 1 | |
| ASSAY0249 | Hs00356977_m1 | PLEC | plectin | TGCAGGATGCCCAGGACGAGAAGGA |
| ASSAY0250* | Hs00363005_m1 | SCRIB | scribbled homolog | ACGGAGAACCTGCTGATGGCCCTGC |
| | | | (Drosophila) | |
| ASSAY0251 | Hs00367259_m1 | GOLGA8B; | golgin A8 family, | AGAAGCCGGATGGGTTCTCGAGCCG |
| | | GOLGA8A | member B; golgin A8 | |
| | | | family, member A | |
| ASSAY0254* | Hs00382453_m1 | XPO5 | exportin 5 | TTGCGCTTATAAGAACCCACAATAC |
| ASSAY0267* | Hs00609831_g1 | AARS | alanyl-tRNA synthetase | CGGCGCCTCAGCCAAGGCCCTGAAT |
| ASSAY0270 | Hs00754750_s1 | PTP4A2 | protein tyrosine | CCTTTTCCCCCGATCCAAGTTGTAG |
| | | | phosphatase type IVA, | |
| | | | member 2 | |
| ASSAY0272 | Hs00831506_g1 | PEBP1 | phosphatidylethanol- | TGGCAAATTCAAGGTGGCGTCCTTC |
| | | | amine binding protein 1 | |
| ASSAY0281 | Hs00191727_m1 | WTAP | Wilms tumor 1 | TGGCAAATTCAAGGTGGCGTCCTTC |
| | | | associated protein | |
| ASSAY0285 | Hs00194072_m1 | APBA2 | amyloid beta (A4) | AACATTCCAGAGACAAAGAAGGTGG |
| | | | precursor protein- | |
| | | | binding, family A, | |
| | | | member 2 | |
| ASSAY0286 | Hs00194400_m1 | LPP | LIM domain containing | GAGGACTTCCACAAGAAATTTGCCC |
| | | | preferred translocation | |
| | | | partner in lipoma | |
| ASSAY0291* | Hs00195560_m1 | MTHFR | 5,10-methylenetetra- | GTGGCAGGTTACCCCAAAGGCCACC |
| | | | hydrofolate reductase | |
| | | | (NAPDH) | |
| ASSAY0294* | Hs00196191_m1 | CD7 | CD7 molecule | TGGCGAGGACACAGATAAAGAAACT |
| ASSAY0296* | Hs00196955_m1 | NCOR2 | nuclear receptor co- | GCGCCGAGCTGGCCTCCATGGAGCT |
| | | | repressor 2 | |
| ASSAY0302 | Hs00198676_m1 | TCERG1 | transcription | TACTCCATGGTGTGTCGTTTGGACT |
| | | | elongation regulator 1 | |
| ASSAY0309* | Hs00200073_m1 | NDUFV1 | NADH dehydrogenase | CGGCGACACGACAGCACCCAAGAAA |
| | | | (ubiquinone) flavo- | |
| | | | protein 1, 51 kDa | |
| ASSAY0313* | Hs00201247_m1 | NCBP2 | nuclear cap binding | GACCAGCACTTCCGGGGTGACAATG |
| | | | protein subunit 2, | |
| | | | 20 kDa | |
| ASSAY0319 | Hs00202185_m1 | FTSJ1 | FtsJ homolog 1 | CTTAACCCATTACGCTGGCAAACTG |
| | | | (E. coli) | |
| ASSAY0332* | Hs00205182_m1 | SND1 | staphylococcal | CAGCGAGAGGTGGAGGTGGAGGTGG |
| | | | nuclease and tudor | |
| | | | domain containing 1 | |
| ASSAY0338 | Hs00209768_m1 | C17orf81 | chromosome 17 open | GATATCAACAATCGGCTGGTTTACC |
| | | | reading frame 81 | |
| ASSAY0339* | Hs00209887_m1 | ABHD14A | abhydrolase domain | GCCCTTGACCTTCCAGGTTTTGGGA |
| | | | containing 14A | |
| ASSAY0343* | Hs00211070_m1 | ERGIC3 | ERGIC and golgi 3 | AGCGGCATGAGCTTGGGAAAGTCGA |
| ASSAY0355 | Hs00214019_m1 | SMG6 | Smg-6 homolog, | CCCCTCATCGTGATCAATGAGCTGG |
| | | | nonsense mediated mRNA | |
| | | | decay factor | |
| | | | (C. elegans) | |
| ASSAY0358* | Hs00214624_m1 | TMEM214 | transmembrane | TCCTTCCAGGCCTCCCTTACTGGCC |
| | | | protein 214 | |
| ASSAY0361* | Hs00215064_m1 | BTBD2 | BTB (POZ) domain | TCGCTGCAGGTCCCGCACAGTCGGG |
| | | | containing 2 | |
| ASSAY0364 | Hs00215334_m1 | INTS8 | integrator complex | AAATGAGGCTTCCTGATATTCCTCT |
| | | | subunit 8 | |
| ASSAY0369* | Hs00217022_m1 | ZFP64 | zinc finger protein 64 | AGACAATCACAGTTTCAGCTCCAGA |
| | | | homolog (mouse) | |
| ASSAY0374 | Hs00218284_m1 | TBC1D2 | TBC1 domain family, | CTTCTGACGAAGTGCGCCTACCTCC |
| | | | member 2 | |
| ASSAY0376* | Hs00234404_m1 | FKBP2 | FK506 binding protein | CACTACACGGGGAAGCTGGAAGATG |
| | | | 2, 13 kDa | |
| ASSAY0380* | Hs00609603_m1 | ACVR2B | activin A receptor, | ATTGCCCACAGGGACTTTAAAAGTA |
| | | | type IIB | |
| ASSAY0381* | Hs00612265_m1 | ZCCHC6 | zinc finger, CCHC | GGAAGCAGGAAGTCCTGAAAACAAG |
| | | | domain containing 6 | |
| ASSAY0387 | Hs00260452_m1 | C4orf14 | chromosome 4 open | GTTACTCCAGATTCCAATGGGTGGA |
| | | | reading frame 14 | |
| ASSAY0393 | Hs00295454_s1 | N/A | N/A | AGCTAAGAGGTTTCCAGTGCAATAC |
| ASSAY0394* | Hs00325999_m1 | TET2 | tet oncogene family | GGCAGCACATTGGTATGCACTCTCA |
| | | | member 2 | |
| ASSAY0400 | Hs00379387_m1 | RAD54L2 | RAD54-like 2 | GGCTGCCTCAGGTTCCCAGGGACCT |
| | | | (S. cerevisiae) | |
| ASSAY0401 | Hs00385941_m1 | LSM14A | LSM14A, SCD6 homolog | GCCCTTGCCAAAGTTCGATCCTTTG |
| | | | A (S. cerevisiae) | |
| ASSAY0402* | Hs00390635_m1 | TN1K | TRAF2 and NCK | ACCCATCAGAGCAAGCAACCCTGAT |
| | | | interacting kinase | |
| ASSAY0407 | Hs00540709_s1 | TMEM203 | transmembrane | CGGGAGCTGGTGCAGTGGCTAGGCT |
| | | | protein 203 | |
| ASSAY0415 | Hs00608266_m1 | BYSL | bystin-like | ACCCTCCTGCCAGGCGCACCCTGGC |
| ASSAY0421* | Hs00609836_m1 | AARS | alanyl-tRNA synthetase | CAAAATTTGGGGCTGGATGACACCA |
| ASSAY0423* | Hs00610216_m1 | SH2D2A | SH3 domain protein 2A | GGGCTACACTGCGGCATCTCCCCAG |
| ASSAY0425* | Hs00610478_m1 | PWP2 | PWP2 periodic | GGCTGGCCAAGTACTTCTTCAATAA |
| | | | tryptophan protein | |
| | | | homolog (yeast) | |
| ASSAY0432* | Hs00696974_m1 | BUD31 | BUD31 homolog | GAAAGCCATCAGCAGAGAACTCTAT |
| | | | (S. cerevisiae) | |
| ASSAY0433 | Hs00697331_m1 | YTHDF1 | YTH domain family, | TGGTGCGCAAGGAACGGCAGAGTCG |
| | | | member 1 | |
| ASSAY0434 | Hs00698392_m1 | ZMYND17 | zinc finger, MYND-type | GTGGCGGCATTCCATCCAGGTTTTC |
| | | | containing 17 | |
| ASSAY0437* | Hs00705412_s1 | NFIL3 | nuclear factor, inter- | ACTCTCCACAAAGCTCGCTGTCCGA |
| | | | leukin 3 regulated | |
| ASSAY0450 | Hs00743508_s1 | C18orf32 | chromosome 18 open | AGGTAGAATTTTGGGAGGTAATAAT |
| | | | reading frame 32 | |
| ASSAY0463 | Hs00762481_s1 | RPL36 | ribosomal protein L36 | CCTTCTCCCCGTCGCTGTCCGCAGC |
| ASSAY0465 | Hs00793492_m1 | SARNP | SAP domain containing | ACTGTTGATGTGGCAGCAGAGAAGA |
| | | | ribonucleoprotein | |
| ASSAY0473* | Hs00234720_g1 | BASP1 | brain abundant, | CCCAGAGCCGAACTCCAAGATGGGA |
| | | | membrane attached | |
| | | | signal protein 1 | |
| ASSAY0478* | Hs00237047_m1 | YWHAZ | tyrosine 3-monooxy- | GATAAAAAGAACATCCAGTCATGGA |
| | | | genase/tryptophan 5- | |
| | | | activation protein, | |
| | | | zeta polypeptide | |
| ASSAY0484 | Hs00244740_m1 | CDC25B | cell division cycle 25 | GGCGGAGCAGACGTTTGAACAGGCC |
| | | | homolog B (S. pombe) | |
| ASSAY0485* | Hs00247369_m1 | USP21 | ubiquitin specific | TCTGATGACAAGATGGCTCATCACA |
| | | | peptidase 21 | |
| ASSAY0489 | Hs00248408_m1 | Sep-06 | septin 6 | AGAAAGAGCTGCACGAGAAGTTTGA |
| ASSAY0494* | Hs00252433_m1 | CDC42SE1 | CDC42 small effector 1 | AGAGCAGGGTTCCGAGTCTGAGGAA |
| ASSAY0495 | Hs00253715_m1 | FXYD2 | FXYD domain containing | GTGGTACCTGGGCGGCAGCCCCAAG |
| | | | ion transport | |
| | | | regulator 2 | |
| ASSAY0497 | Hs00254277_m1 | NAA35 | N(alpha)-acetyl- | ACTCACTGTGTTCGGCCATTCTGTA |
| | | | transferase 35, NatC | |
| | | | auxiliary subunit | |
| ASSAY0499 | Hs00254802_s1 | RBM8A; | RNA binding motif | CCCTTCCTTGTCTGGGGCCTGGACA |
| | | GNRHR2 | protein 8A; gonado- | |
| | | | tropin-releasing | |
| | | | hormone (type 2) | |
| | | | receptor 2 | |
| ASSAY0504* | Hs00257861_m1 | COQ10B | coenzyme Q10 homolog | CGCCCGTGCGGAATGGCAGATATTT |
| | | | B (S. cerevisiae) | |
| ASSAY0509* | Hs00260517_s1 | CAPNS2 | calpain, small subunit | GATCGAGGTCTTGGAGAAGCTCTTG |
| | | | 2 | |
| ASSAY0510 | Hs00260545_m1 | GINS4 | GINS complex subunit 4 | TTGGAGCAGGCCTGGATGAATGAAA |
| | | | (Sld5 homolog) | |
| ASSAY0513* | Hs00260900_m1 | C5orf32 | chromosome 5 open | CAGGAGCCTCCTAAAACCACAGTGT |
| | | | reading frame 32 | |
| ASSAY0517* | Hs00261978_m1 | PYROXD2 | pyridine nucleotide- | TGGTGGCTGCAGCGTACCTGCAGAG |
| | | | disulphide oxidere- | |
| | | | ductase domain 2 | |
| ASSAY0518 | Hs00262488_m1 | FIZ1 | FLT3-interacting zinc | TGCACCACCAGGTCGTCCACACTGG |
| | | | finger 1 | |
| ASSAY0521 | Hs00263798_m1 | ALG2 | asparagine-linked | TAGTGTGCGACCAGGTGTCTGCCTG |
| | | | glycosylation 2, alpha- | |
| | | | 1,3-mannosyltrans- | |
| | | | ferase homolog | |
| | | | (S. cerevisiae) | |
| ASSAY0534 | Hs00268265_m1 | SMARCC1 | SWI/SNF related, | CCAAACTCCCTGCAAAGTGTTTCAT |
| | | | matrix associated, | |
| | | | actin dependent | |
| | | | regulator or chromatin, | |
| | | | subfamily c, member 1 | |
| ASSAY0545 | Hs00272390_m1 | PAICS | phosphoribosylamino- | ATGGCGACAGCTGAGGTACTGAACA |
| | | | imidazole carboxylase, | |
| | | | phosphoribosylamino- | |
| | | | imidazole succinocar- | |
| | | | boxamide synthase | |
| ASSAY0548 | Hs00273238_m1 | BACE2 | beta-site APP-cleaving | ACACTTGCCAAGCCATCAAGTTCTC |
| | | | enzyme 2 | |
| ASSAY0549 | Hs00273329_s1 | NAT6 | N-acetyltransferase 6 | CCGCACCTCCCGCCTGCACTCCCTG |
| | | | (GCN5-related) | |
| ASSAY0553* | Hs00275656_m1 | GSK3B | glycogen synthase | AGAAATAATCAAGGTCCTGGGAACT |
| | | | kinase 3 beta | |
| ASSAY0559* | Hs00291515_m1 | IKBIP | IKBKB interacting | TAATTTCAGAAAAGCTTGAGTCTAC |
| | | | protein | |
| ASSAY0561* | Hs00292281_m1 | LOC439949 | hypothetical protein | AAGCTGCAAAGGTTCTGCCCTGATG |
| | | | LOC439949 | |
| ASSAY0566 | Hs00293370_m1 | SPPL3 | signal peptide | TATTTAAAGGGCGACCTCCGGCGGA |
| | | | peptidase 3 | |
| ASSAY0567 | Hs00298028_s1 | BTBD9 | BTB (POZ) domain | CCACCACTGGTCACGGTGCTCCCTG |
| | | | containing 9 | |
| ASSAY0568* | Hs00298999_m1 | SLC38A10 | solute carrier family | TTCGCCTGCCAGTCCCAGGTGCTGC |
| | | | 38, member 10 | |
| ASSAY0572* | Hs00300396_m1 | PEPL1 | proline, glutamate and | TCTCTCAAAGGCAAGCTGGCCTCAT |
| | | | leucine rich protein 1 | |
| ASSAY0573 | Hs00324432_m1 | RAP1GAP2 | RAP1 GTPase activating | TTTCAAAGGTTTCCGAGGAGGCCTG |
| | | | protein 2 | |
| ASSAY0574* | Hs00325168_m1 | NUFIP2 | nuclear fragile X | AAGAAAACAGGCTATGGTGAACTAA |
| | | | mental retardation | |
| | | | protein interacting | |
| | | | protein 2 | |
| ASSAY0575* | Hs00325918_m1 | ALPK1 | alpha-kinase 1 | TTCTGGGGAGGTATGTTGGGAAAGA |
| ASSAY0577* | Hs00328354_m1 | HUWE1 | HECT, UBA and WWE | GAAAAAGATCAGATGGGGAACAGGA |
| | | | domain containing 1 | |
| ASSAY0578 | Hs00329245_s1 | C20orf117 | chromosome 20 open | GAGGACATGATGCTGGGCCCAAGTC |
| | | | reading frame 117 | |
| ASSAY0583 | Hs00356436_m1 | PCK2 | phosphoenolpyruvate | CCCTGGCCTGCGGCTTAACTGGCAT |
| | | | carboxykinase 2 | |
| | | | (mitochondrial) | |
| ASSAY0591 | Hs00361490_m1 | CNR2 | cannabinoid receptor 2 | ACAACACAACCCAAAGCCTTCTAGA |
| | | | (macrophage) | |
| ASSAY0593 | Hs00362511_g1 | SUGT1 | SGT1, suppressor of | CTGCAACATCCCAGAGGTTTTTCCA |
| | | | G2 allele of SKP1 | |
| | | | (S. cerevisiae) | |
| ASSAY0596 | Hs00364293_m1 | CDK1 | cyclin-dependent | TTGGATTTGCTCTCGAAAATGTTAA |
| | | | kinase 1 | |
| ASSAY0599 | Hs00365678_g1 | RAB24 | RAB24, member RAS | GTATTTGGGACACAGCAGGCTCTGA |
| | | | oncogene family | |
| ASSAY0601 | Hs00366434_m1 | SERPINB6 | serpin peptidase | AGATGGCCCAGATACTTTCTTTCAA |
| | | | inhibitor clade B | |
| | | | (ovalbumin), member 6 | |
| ASSAY0613 | Hs00372436_s1 | XKR8 | XK, Kell blood group | AGCTCCGAGTGGCTGTACCGGGTGA |
| | | | complex subunit- | |
| | | | related family, member | |
| | | | 8 | |
| ASSAY0614* | Hs00373045_m1 | GAB2 | GRB2-associated | GAGAGCACAGACTCCCTGAGAAATG |
| | | | binding protein 2 | |
| ASSAY0616 | Hs00375126_m1 | BCAS3 | breast carcinoma | GTCACCCTTGCATGGGAAACTGAAC |
| | | | amplified sequence 3 | |
| ASSAY0624 | Hs00377427_m1 | APBB1 | amyloid beta (A4) | TCCCCAGAGGACACAGATTCCTTCT |
| | | | precursor protein- | |
| | | | binding, family B, | |
| | | | member 1 (Fe65) | |
| ASSAY0625 | Hs00378208_m1 | UBR4 | ubiquitin protein | CACTTGCTTGGCAAGACACAACACT |
| | | | ligase E3 component | |
| | | | n-recognin 4 | |
| ASSAY0626 | Hs00378210_m1 | UBR4 | ubiquitin protein | TGGAGCCACCAGGCTGACAGATAAG |
| | | | ligase E3 component | |
| | | | n-recognin 4 | |
| ASSAY0629 | Hs00378902_m1 | ZNF337 | zinc finger protein 337 | CAGGCCCCTGTGCAGGAATATATGC |
| ASSAY0633 | Hs00379355_m1 | GRPEL1 | GrpE-like 1, | CGTTGTCTCTCAGGCCATCTCCCCG |
| | | | mitochondrial (E. coli) | |
| ASSAY0637 | Hs00383718_m1 | C5AR1 | complement component | AGACCAGAACATGAACTCCTTCAAT |
| | | | 5a receptor 1 | |
| ASSAY0638 | Hs00384448_m1 | PARS2 | prolyl-tRNA synthetase | GGCTGGGATTGCGGTGCCTGTGCTT |
| | | | 2, mitochondrial | |
| | | | (putative) | |
| ASSAY0640 | Hs00385075_m1 | MAPK3 | mitogen-activated | AGATGTCTACATTGTGCAGGACCTG |
| | | | protein kinase 3 | |
| ASSAY0644* | Hs00386171_m1 | C4orf3 | chromosome 4 open | TATTTTTTGCCATGACTTGTTCGCT |
| | | | reading frame 3 | |
| ASSAY0645* | Hs00387426_m1 | MAP2K4 | mitogen-activated | CAAATAATGGCAGTTAAAAGAATTC |
| | | | protein kinase kinase 4 | |
| ASSAY0648* | Hs00389570_m1 | SEC16A | SEC16 homolog A | AACCTAAGAAGGGTGAATCCTGGTT |
| | | | (S. cerevisiae) | |
| ASSAY0649 | Hs00390028_m1 | TCF20 | transcription factor | GGAAATAGCCAGAGAGATGAAATGT |
| | | | 20 (AR1) | |
| ASSAY0650 | Hs00390576_m1 | ZNF862 | zinc finger protein 862 | GCTGTTGGCATCCTTGGGACCTGCT |
| ASSAY0651 | Hs00391737_m1 | SMG6 | Smg-6 homolog, nonsense | ACGCAAGACAGTAAAATATGCCTTG |
| | | | mediated mRNA decay | |
| | | | factor (C. elegans) | |
| ASSAY0655* | Hs00394683_m1 | LST1 | leukocyte specific | AGGCCACAAGCTCTGGATGAGGAAC |
| | | | transcript 1 | |
| ASSAY0656 | Hs00395045_m1 | STMN3 | stathmin-like 3 | CCAGTACGGGGACATGGAGGTGAAG |
| ASSAY0660* | Hs00402617_m1 | MPZL3 | myelin protein zero- | GTGCCTGGATTCAGACTATGAAGAG |
| | | | like 3 | |
| ASSAY0661* | Hs00405469_m1 | JMJD1C | jumonji domain | TCAAAAGCAGGAATTCTCAAGAAAT |
| | | | containing 1C | |
| ASSAY0668* | Hs00411197_m1 | LRRK2 | leucine-rich repeat | GACAAGAACAAGCCAACTGTTTTCT |
| | | | kinase 2 | |
| ASSAY0684* | Hs00417273_m1 | LRRK2 | leucine-rich repeat | TTTGGCCCTCCTCACTGAGACTATT |
| | | | kinase 2 | |
| ASSAY0686* | Hs00418955_m1 | SMCHD1 | structural maintenance | AAGGATTTTAAATGGACAGGAACAG |
| | | | of chromosomes | |
| | | | flexible hinge domain | |
| | | | containing 1 | |
| ASSAY0687 | Hs00419531_m1 | NSF | N-ethylmaleimide- | TTTCCAGTCTGGCCAGCATGTGATT |
| | | | sensitive factor | |
| ASSAY0695* | Hs00427795_g1 | TNFRSF10C | tumor necrosis factor | CGGAAGTGTAGCAGGTGCCCTAGTG |
| | | | receptor superfamily, | |
| | | | member 10c, decoy | |
| | | | without an intra- | |
| | | | cellular domain | |
| ASSAY0702 | Hs00429977_m1 | SHISA5 | shisa homolog 5 | CCGGGTGCACGTGGTGAGGTGTGTA |
| | | | (Xenopus laevis) | |
| ASSAY0712* | Hs00537038_m1 | TNFAIP8L1 | tumor necrosis factor, | TGCTTCGAGAGTAGGCCATGGACAC |
| | | | alpha-induced protein | |
| | | | 8-like 1 | |
| ASSAY0713 | Hs00538077_m1 | C5orf41 | chromosome 5 open | ACACCCACAGACAGCATCGCACAGA |
| | | | reading frame 41 | |
| ASSAY0722 | Hs00541991_m1 | C19orf46 | chromosome 19 open | CTCCGGAAGCCTCAGGACAAGAAGA |
| | | | reading frame 46 | |
| ASSAY0725* | Hs00543135_m1 | C22orf30 | chromosome 22 open | CACAAGCAGCCACACCATGTTACCA |
| | | | reading frame 30 | |
| ASSAY0727 | Hs00544314_s1 | LCMT2 | leucine carboxyl | CGGAGCCGTGAGCGTCGGGCAGGCG |
| | | | methyltransferase 2 | |
| ASSAY0734* | Hs00602957_m1 | HN1 | hematological and | CCAAGTCAGCAGGTGCCAAGTCTAG |
| | | | neurological expressed | |
| | | | 1 | |
| ASSAY0744 | Hs00819308_m1 | SEC11A | SEC11 homolog A | CTATCCTAAATTTAAGTATGCAGTT |
| | | | (S. cerevisiae) | |
| ASSAY0745 | Hs00826823_m1 | SFI1 | Sfi1 homolog, spindle | GCAGAACCTCTGGTCCTGTCGGCGG |
| | | | assembly associated | |
| | | | (yeast) | |
| ASSAY0748 | Hs00830558_g1 | FOXN3 | forkhead box N3 | TCTAGGGACTTGGTGTTGCTTGGAA |
| ASSAY0754* | Hs00867656_s1 | DLEU2 | deleted in lymphocytic | AAAAATTTATTTTACACATGTCAAG |
| | | | leukemia 2 (non- | |
| | | | protein coding) | |
| ASSAY0763* | Hs00907493_m1 | TRA2B | transformer 2 beta | ATCAGATTTATAGAAGGCGGTCACC |
| | | | homolog (Drosophila) | |
| ASSAY0778 | Hs00939205_m1 | RNF24 | ring finger protein 24 | GCCTTCCACAGAAAGTGCCTTATTA |
| ASSAY0781* | Hs00943178_g1 | PGK1 | phosphoglycerate | AGCCCACAGCTCCATGGTAGGAGTC |
| | | | kinase 1 | |
| ASSAY0784 | Hs00949382_m1 | ST6GAL1 | ST6 beta-galactosamide | CCAAAGTGGTACCAGAATCCGGATT |
| | | | alpha-2,6-sialyltrans- | |
| | | | ferase 1 | |
| ASSAY0795* | Hs00971411_m1 | ANXA3 | annexin A3 | TTACTGTTGGCCATAGTTAATTGTG |
| ASSAY0797 | Hs00975865_m1 | BTK | Bruton | TTATCCCTTCCAGGTTGTATATGAT |
| | | | agammaglobulinemia | |
| | | | tyrosine kinase | |
| ASSAY0806 | Hs00997789_m1 | PSEN1 | presenilin 1 | TTCATTTACTTGGGGGAAGTGTTTA |
| ASSAY0818 | Hs01018736_g1 | UBL3 | ubiquitin-like 3 | GCCAAACTCTCAAGGTCAGAGGAAT |
| ASSAY0820 | Hs01031740_m1 | ARPC2 | actin related protein | TGAAAACAATCACGGGGAAGACGTT |
| | | | ⅔ complex, subunit 2, | |
| | | | 34 kDa | |
| ASSAY0821* | Hs01032565_m1 | ST6GALNAC2 | ST6 (alpha-N-acetyl- | CCTGTGACCAGGTCAGTGCCTATGG |
| | | | neuraminyl-2,3-beta- | |
| | | | galactosyl-1,3)-N- | |
| | | | acetylgalactosaminide | |
| | | | alpha-2,6-sialyltrans- | |
| | | | ferase 2 | |
| ASSAY0822 | Hs01032700_m1 | LBR | lamin B receptor | TTATTGTTCTGAAACTTTGTGGTTA |
| ASSAY0842 | Hs01062739_m1 | TMX4 | thioredoxin-related | TCTGAGCGTTCTGAGCAGAATCGGA |
| | | | transmembrane protein 4 | |
| ASSAY0843* | Hs01064052_g1 | SEPX1 | selenoprotein X, 1 | TTGTCCCTAAAGGCAAAGAAACTTC |
| ASSAY0844 | Hs01064792_m1 | TRANK1 | tetraatricopeptide | TAAAGAAGGAAGGTATTGTTCAGGA |
| | | | repeat and ankyrin | |
| | | | repeat containing 1 | |
| ASSAY0862* | Hs01095303_m1 | RALB | v-ral simian leukemia | AACGTGGACAAGGTGTTCTTTGACC |
| | | | viral oncogene homolog | |
| | | | B (ras related; GTP | |
| | | | binding protein) | |
| ASSAY0866* | Hs01108442_s1 | N/A | N/A | CCCTAACATTTCAAGAAGAAGCAGA |
| ASSAY0874* | Hs01123242_m1 | BACE1 | beta-site APP cleaving | GAGATTGCCAGGCCTGACGACTCCC |
| | | | enzyme 1 | |
| ASSAY0876 | Hs01372307_m1 | ZDHHC18 | zinc finger, DHHC-type | ACCTCCCAGCCTAATTGACCGGAGG |
| | | | containing 18 | |
| ASSAY0882* | Hs01550808_m1 | MX2 | myxovirus (influenza | GAATGCCTACTTCTTGGAAACCAGC |
| | | | virus) resistance 2 | |
| | | | (mouse) | |
| ASSAY0885 | Hs01555410_m1 | IL1B | interleukin 1, beta | CAGATGAAGTGCTCCTTCCAGGACC |
| ASSAY0886* | Hs01564142_m1 | GLIPR1 | GLI pathogenesis- | CTATACATGACTTGGGACCCAGCAC |
| | | | related 1 | |
| ASSAY0887* | Hs01573482_m1 | IVNS1ABP | influenza virus NS1A | GAGTGGCTGTTCTTAATGGAAAACT |
| | | | binding protein | |
| ASSAY0895 | Hs01593434_s1 | N/A | N/A | GCTCCAGAGCTTACTGACATGGGCC |
| ASSAY0899* | Hs01632947_g1 | CCDC72 | coiled-coil domain | GGAATTAAGTGTTGTCTTGGAGCTG |
| | | | containing 72 | |
| ASSAY0912* | Hs01932078_s1 | COMMD6 | COMM domain | AGATTAAGATTGACCATTGCTCCTT |
| | | | containing 6 | |
| ASSAY0919 | Hs02510591_s1 | DPYD | dihydropyrimidine | GATGGGTGTACAAACTCATCCTCTT |
| | | | dehydrogenase | |
| ASSAY0921 | Hs02596877_g1 | MT-ND4L; | mitochondrially | CCCTCAACACCCACTCCCTCTTAGC |
| | | CCDC104 | encoded NADH 4L; | |
| | | | coiled-coil domain | |
| | | | containing 104 | |
| ASSAY0922 | Hs02597217_g1 | GNG10; | guanine nucleotide | GAGAGGATCAAGGTCTCTCAGGCAG |
| | | LOC653503 | binding protein (G | |
| | | | protein), gamma 10; | |
| | | | GNG10 pseudogene | |
| ASSAY0927 | Hs03037952_m1 | NAIP | NLR family, apoptosis | GCGTGGTGGAAATTGCCAAAGTAGC |
| | | | inhibitory protein | |
| ASSAY0935* | Hs00991010_m1 | IL1R1 | interleukin 1 receptor, | TATTACAGTGTGGAAAATCCTGCAA |
| | | | type I | |
| ASSAY0941* | Hs00328784_s1 | MTMR3 | myotubularin related | CCCTCGGGAAGGTTGGTATTGAGGG |
| | | | protein 3 | |
| ASSAY0947* | Hs00254569_s1 | HRH2 | histamine receptor H2 | GGTCACCCCAGTTCGGGTCGCCATC |
| ASSAY0957 | Hs00536435_m1 | NLRP12 | NLR family, pyrin | ACTACGGACTTTGTGGCTGAAGATC |
| | | | domain containing 12 | |
| ASSAY0960* | Hs00984297_m1 | C1orf175 | chromosome 1 open | AATGAAGTGAAAGCTGCTCTGGATA |
| | | | reading frame 175 | |
| ASSAY0962* | Hs00211306_m1 | DHRS7 | dehydrogenase/reductase | CTTTAAGAGTGGTGTGGATGCAGAC |
| | | | (SDR family) member 7 | |
| ASSAY0969* | Hs00948075_m1 | HUWE1 | HECT, UBA and WWE | TCAATTGGCCAAGGTATTTCCCAGC |
| | | | domain containing 1 | |
| ASSAY0971* | Hs00391048_m1 | MEGF9 | multiple EGF-like- | GTGCAACAGTTCTGGGAAATGCCAG |
| | | | domains 9 | |
| ASSAY0986 | Hs00990751_m1 | TCIRG1 | T-cell, immune | ACCCCGCTCCCTACACCATCATCAC |
| | | | regulator 1, ATPase, | |
| | | | H+ transporting, | |
| | | | lysosomal V0 subunit A3 | |
| ASSAY0987 | Hs00179553_m1 | MINK1 | misshapen-like kinase | ACAGGTGTACAAGGGTCGGCATGTC |
| | | | 1 (zebrafish) | |
| ASSAY0997 | Hs00699585_m1 | PDDC1 | Parkinson disease 7 | TCCACTCTGAGAGCAAACCCATCTG |
| | | | domain containing 1 | |
| ASSAY1002 | Hs00219444_m1 | ING3 | inhibitor of growth | GGTGCAGAATGCAATGGATCAACTA |
| | | | family, member 3 | |
| ASSAY1004 | Hs00182998_m1 | LRP8 | low density lipoprotein | GGACGACTGCCCCAAGAAGACCTGT |
| | | | receptor-related | |
| | | | protein 8, apolipo- | |
| | | | protein receptor | |
| ASSAY1007* | Hs00226343_m1 | PARP8 | poly (ADP-ribose) | CAACTGGAGCTCAGGTGGTAGATCT |
| | | | polymerase family, | |
| | | | member 8 | |
| ASSAY1019* | Hs00271722_m1 | ARPC5 | actin related protein | GTCAGGCAGTGAAGGACCGGGCAGG |
| | | | 2/3 complex, subunit 5, | |
| | | | 16 kDa | |
| ASSAY1026 | Hs00162271_m1 | SPTBN1 | spectrin, beta, non- | GCTCTGGGCACACAGGTGAGGCAGC |
| | | | erythrocytic 1 | |
| ASSAY1037 | Hs00300550_m1 | LAMA1 | laminin, alpha 1 | GGCAGAGAGGCCTGTTTCCTGCCAT |
| ASSAY1039* | Hs00425763_m1 | TAF6 | TAF6 RNA polymerase II, | GAGCCTCCTGCTGAAACACTGTGCT |
| | | | TATA box binding | |
| | | | protein (TBP)- | |
| | | | associated factor | |
| | | | 80 kDa | |
| ASSAY1042 | Hs00202482_m1 | ACOT9 | acyl-CoA thioesterase 9 | CTGAAAATAAAGGGCCGGCATTTGT |
| ASSAY1051 | Hs03045171_m1 | HLA-E | major histocompati- | CTGCTTCACCTGGAGCCCCCAAAGA |
| | | | bility complex, | |
| | | | class I, E | |
| ASSAY1058* | Hs00369593_m1 | RBM33 | RNA binding motif | GAAAATTTCAGTTCTCAGGGTGTTA |
| | | | protein 33 | |
| ASSAY1059* | Hs00195059_m1 | SORBS3 | sorbin and SH3 domain | ATGGCTGGTTTGTGGGTGTCTCCCG |
| | | | containing 3 | |
| ASSAY1061* | Hs00330542_m1 | TPCN1 | two pore segment | TACCTCCAGGAAGGCGAGAACAACG |
| | | | channel 1 | |
| ASSAY1064 | Hs00559914_m1 | YKT6 | YKT6 v-SNARE homolog | TATAAAACTGCCCGGAAACAAAACT |
| | | | (S. cerevisiae) | |
| ASSAY1078* | Hs00229975_m1 | HUWE1 | HECT, UBA and WWE | TGAGAATGACAGGAGCCATCCGCAA |
| | | | domain containing 1 | |
| ASSAY1084 | Hs00390223_m1 | UBR4 | ubiquitin protein | ACATGACCACAGGTACAGAATCAGA |
| | | | ligase E3 component n- | |
| | | | recognin 4 | |
| ASSAY1093* | Hs00226352_m1 | ZCCHC6 | zinc finger, CCHC | AAAGGCTCTTCAGGTAGCCTTTCCA |
| | | | domain containing 6 | |
| ASSAY0197 | Hs00704884_s1 | C5AR1 | complement component | TATTTATTTTATGGCAAGTTGGAAA |
| | | | 5a receptor 1 | |
| ASSAY1103 | Hs00300475_s1 | SORL1 | sortilin-related | CAGAAGACACACAGCTGCCTGTTCT |
| | | | receptor, L(DLR class) | |
| | | | A repeats-containing | |

Assays with p values <0.5 are marked with an asterisk.

TABLE 10
Informative probes for Retrospective Intraperson Progression or
Non-Progression (AD) (All probes have p-value <0.5)

| Sequence No. | | Gene | | Context Sequence |
|---|---|---|---|---|
| (DiaGenic Probe ID) | Assay ID | Symbol | Gene name | (Oligonucleotide sequence) |
| ASSAY0002 | Hs00153510_m1 | MME | membrane metallo- | TGAAGAAAAGGCCTTAGCAATTAAA |
| | | | endopeptidase | |
| ASSAY0006 | Hs00220373_m1 | SLC12A9 | solute carrier/family | CTCCGGCCTCGGTGGCATGAAGCCC |
| | | | 12 (potassium/chloride | |
| | | | transporters), member | |
| | | | 9 | |
| ASSAY0007 | Hs00221912_m1 | ARHGAP22 | Rho GTPase activating | AGTGTGAAAAGAATCGAAGAAGGGA |
| | | | protein 22 | |
| ASSAY0013 | Hs00163311_m1 | UBE2B | ubiquitin-conjugating | CACCTTTTGAAGATGGTACTTTTAA |
| | | | enzyme E2B (RAD6 | |
| | | | homolog) | |
| ASSAY0015 | Hs00174469_m1 | KLRB1 | killer cell lectin- | TTCCTCGGGATGTCTGTCAGGGTTC |
| | | | like receptor sub- | |
| | | | family B, member 1 | |
| ASSAY0053 | Hs00221104_m1 | ABHD6 | abhydrolase domain | CGTGTGTCCTGCTGGCCTGCAGTAC |
| | | | containing 6 | |
| ASSAY0077 | Hs00227357_m1 | LPCAT1 | lysophosphatidyl- | GAAGATCACATTCGCTGACTTCCAC |
| | | | choline acyltrans- | |
| | | | ferase 1 | |
| ASSAY0081 | Hs00228559_m1 | ELL3 | elongation factor RNA | CAGAATACAAGGTCCTGGAAGACAA |
| | | | polymerase II-like 3 | |
| ASSAY0098 | Hs00153519_m1 | MME | membrane metallo- | TCCAGGCAATTTCAGGATTATTGGG |
| | | | endopeptidase | |
| ASSAY0118 | Hs00158875_m1 | LRPAP1 | low density lipo- | AAGGCCCAGCGACTGCATCTTCCTC |
| | | | protein receptor- | |
| | | | related protein | |
| | | | associated protein 1 | |
| ASSAY0119 | Hs00159537_m1 | NBN | nibrin | CCCGGCAGGAGGAGAACCATACAGA |
| ASSAY0133 | Hs00167309_m1 | SOD2 | superoxide dismutase | GGAACAACAGGCCTTATTCCACTGC |
| | | | 2, mitochondrial | |
| ASSAY0162 | Hs00177028_m1 | PKN1 | protein kinase N1 | TGGCAGCACCAAGGACCGGAAGCTG |
| ASSAY0172 | Hs00182671_m1 | NAE1 | NEDD8 activating | GACCGGCAGCTGAGGTTGTGGGGTG |
| | | | enzyme E1 subunit 1 | |
| ASSAY0186 | Hs00189566_m1 | GOLGB1 | golgin B1 | CAGCAACTGAACAGCAACTTCTCTC |
| ASSAY0223 | Hs00215938_m1 | RNF31 | ring finger protein 31 | TGCCCCACAACCGGATGCAGGCCCT |
| ASSAY0225 | Hs00218331_m1 | KDM3A | lysine (K)-specific | TTCTTAAAAAGGTATCAGAAGAGCA |
| | | | demethylase 3A | |
| ASSAY0242 | Hs00276830_m1 | RUNDC2A | RUN domain | CAGTGAAACAGTGCCAGATCCGCTT |
| | | | containing 2A | |
| ASSAY0245 | Hs00326671_m1 | TTC14 | tetratricopeptide | AGAGAGAGGAGGACAGTTAGAAGAA |
| | | | repeat domain 14 | |
| ASSAY0254 | Hs00382453_m1 | XPO5 | exportin 5 | TTGCGCTTATAAGAACCCACAATAC |
| ASSAY0292 | Hs00195718_m1 | TAX1BP1 | Tax1 (human T-cell | AAACAACTCTTGCAGGATGAGAAAG |
| | | | leukemia virus type I) | |
| | | | binding protein 1 | |
| ASSAY0299 | Hs00197744_m1 | POLR3C | polymerase (RNA) III | CAGATAACAAGGAGCCCATTCCAGA |
| | | | (DNA directed) | |
| | | | polypeptide C (62 kDa) | |
| ASSAY0334 | Hs00206922_m1 | CP110 | CP110 protein | TCTCCACTGCTTAACATTGAGAAAA |
| ASSAY0337 | Hs00208459_m1 | N4BP2L2 | NEDD4 binding protein | ATTGTCTCGAATTCTGCTTGGTCAG |
| | | | 2-like 2 | |
| ASSAY0344 | Hs00211234_m1 | FAM164A | family with sequence | ACATAGCCAGGCCAGATGGGGACTG |
| | | | similarity 164, | |
| | | | member A | |
| ASSAY0359 | Hs00214745_m1 | DPP8 | dipeptidyl-peptidase 8 | CTGCCTGCTCCAAGTGATTTCAAGT |
| ASSAY0361 | Hs00215064_m1 | BTBD2 | BTB (POZ) domain | TCGCTGCAGGTCCCGCACAGTCGGG |
| | | | containing 2 | |
| ASSAY0366 | Hs00215835_m1 | C19orf60 | chromosome 19 open | CAGCAGCTGAAAATGAAGGTAATTA |
| | | | reading frame 60 | |
| ASSAY0369 | Hs00217022_m1 | ZFP64 | zinc finger protein 64 | AGACAATCACAGTTTCAGCTCCAGA |
| | | | homolog (mouse) | |
| ASSAY0376 | Hs00234404_m1 | FKBP2 | FK506 binding protein | CACTACACGGGGAAGCTGGAAGATG |
| | | | 2, 13 kDa | |
| ASSAY0381 | Hs00612265_m1 | ZCCHC6 | zinc finger, CCHC | GGAAGCAGGAAGTCCTGAAAACAAG |
| | | | domain containing 6 | |
| ASSAY0401 | Hs00385941_m1 | LSM14A | LSM14A, SCD6 homolog | GCCCTTGCCAAAGTTCGATCCTTTG |
| | | | A (S. cerevisiae) | |
| ASSAY0421 | Hs00609836_m1 | AARS | alanyl-tRNA | CAAAATTTGGGGCTGGATGACACCA |
| | | | synthetase | |
| ASSAY0423 | Hs00610216_m1 | SH2D2A | SH2 domain protein 2A | GGGCTACACTGCGGCATCTCCCCAG |
| ASSAY0425 | Hs00610478_m1 | PWP2 | PWP2 periodic | GGCTGGCCAAGTACTTCTTCAATAA |
| | | | tryptophan protein | |
| | | | homolog (yeast) | |
| ASSAY0429 | Hs00611133_m1 | MRPL10 | mitochondrial | CGCTGCTAGGTGGCTGCATTGATGA |
| | | | ribosomal protein L10 | |
| ASSAY0437 | Hs00705412_s1 | NFIL3 | nuclear factor, | ACTCTCCACAAAGCTCGCTGTCCGA |
| | | | interleukin 3 | |
| | | | regulated | |
| ASSAY0452 | Hs00747351_mH | CLTA | clathrin, light chain | GGGGTCCGGATGCTGTTGATGGAGT |
| | | | (Lca) | |
| ASSAY0463 | Hs00762481_s1 | RLP36 | ribosomal protein L36 | CCTTCTCCCCGTCGCTGTCCGCAGC |
| ASSAY0465 | Hs00793492_m1 | SARNP | SAP domain containing | ACTGTTGATGTGGCAGCAGAGAAGA |
| | | | ribonucleoprotein | |
| ASSAY0524 | Hs00264721_m1 | MSH6 | mutS homolog 6 | TGCCCCCACCAGTTGTGACTTCTCA |
| | | | (E. coli) | |
| ASSAY0532 | Hs00267168_s1 | MC1R | melanocortin 1 | GCAGGACGCTCAAGGAGGTGCTGAC |
| | | | receptor (alpha | |
| | | | melanocyte stimulating | |
| | | | hormone receptor) | |
| ASSAY0534 | Hs00268265_m1 | SMARCC1 | SWI/SNF related, | CCAAACTCCCTGCAAAGTGTTTCAT |
| | | | matrix associated, | |
| | | | actin dependent | |
| | | | regulator of | |
| | | | chromatin, subfamily | |
| | | | c, member 1 | |
| ASSAY0546 | Hs00272828_m1 | ZFP36L2 | zinc finger protein | GTCGACTTCTTGTGCAAGACAGAGA |
| | | | 36, C3H type-like 2 | |
| ASSAY0593 | Hs00362511_g1 | SUGT1 | SGT1, suppressor of | CTGCAACATCCCAGAGGTTTTTCCA |
| | | | G2 allele of SKP1 | |
| | | | (S. cerevisiae) | |
| ASSAY0625 | Hs00378208_m1 | UBR4 | ubiquitin protein | CACTTGCTTGGCAAGACACAACACT |
| | | | ligase E3 component | |
| | | | n-recognin 4 | |
| ASSAY0632 | Hs00379295_m1 | C1orf144 | chromosome 1 open | AACCCATCCTCGACAGGCCAACCAG |
| | | | reading frame 144 | |
| ASSAY0661 | Hs00405469_m1 | JMJD1C | jumonji domain | TCAAAAGCAGGAATTCTCAAGAAAT |
| | | | containing 1C | |
| ASSAY0666 | Hs00406365_m1 | MAPKBP1 | mitogen-activated | AGAGGACCTCAGCTCCAAGGTGACC |
| | | | protein kinase binding | |
| | | | protein 1 | |
| ASSAY0674 | Hs00414236_m1 | GLTSCR2 | glioma tumor | CGCACGAGCGGTGGCTTGTTGTCAG |
| | | | suppressor candidate | |
| | | | region gene 2 | |
| ASSAY0679 | Hs00415699_m1 | LOC149837 | hypothetical | TCACCACCTGCCGGCAATCAGCCAT |
| | | | LOC149837 | |
| ASSAY0683 | Hs00417251_m1 | SNHG6 | small nucleolar RNA | TAGCTGGGCTCTGCGAGGTGCAAGA |
| | | | host gene 6 (non- | |
| | | | protein coding) | |
| ASSAY0684 | Hs00417273_m1 | LRRK2 | leucine-rich repeat | TTTGGCCCTCCTCACTGAGACTATT |
| | | | kinase 2 | |
| ASSAY0686 | Hs00418955_m1 | SMCHD1 | structural maintenance | AAGGATTTTAAATGGACAGGAACAG |
| | | | of chromosomes | |
| | | | flexible hinge domain | |
| | | | containing 1 | |
| ASSAY0689 | Hs00419820_g1 | LOC728975 | hypothetical protein | CTGCGTGACCTTGGGCTCTCAGCCC |
| | | | LOC728975 | |
| ASSAY0718 | Hs00539707_m1 | DTX2 | deltex homolog 2 | GGCCGCAAGGTCCTAGAGCTCCTGA |
| | | | (Drosophila) | |
| ASSAY0719 | Hs00540753_m1 | DYNLL2 | dynein, light chain | GCCTCCGTGAAGTGTCACACCATGT |
| | | | LC8-type 2 | |
| ASSAY0726 | Hs00543883_s1 | HIST1H4C | histone cluster 1, | TATGGCTTCGGCGGCTGAATCTAAG |
| | | | H4c | |
| ASSAY0740 | Hs00606809_g1 | MRPL41 | mitochondrial | TCCGGTCCAGGGCGCGGCATGGGCG |
| | | | ribosomal protein L41 | |
| ASSAY0741 | Hs00606874_g1 | TNFRSF13C | tumor necrosis factor | CGGAGACAAGGACGCCCCAGAGCCC |
| | | | receptor superfamily, | |
| | | | member 13C | |
| ASSAY0754 | Hs00867656_s1 | DLEU2 | deleted in lymphocytic | AAAAATTTATTTTACACATGTCAAG |
| | | | leukemia 2 (non- | |
| | | | protein coding) | |
| ASSAY0756 | Hs00894392_m1 | TBX21 | T-box 21 | ACAATGTGACCCAGATGATTGTGCT |
| ASSAY0786 | Hs00953178_m1 | EPHA4 | EPH receptor A4 | CGACCCCAGATCTGCAAGGGAGTAG |
| ASSAY0795 | Hs00971411_m1 | ANXA3 | annexin A3 | TTACTGTTGGCCATAGTTAATTGTG |
| ASSAY0799 | Hs00982887_g1 | BCL2L12 | BCL2-like 12 (proline | CCGCCCAGCCCAGAATTACAGGGTC |
| | | | rich) | |
| ASSAY0874 | Hs00123242_m1 | BACE1 | beta-site APP- | GAGATTGCCAGGCCTGACGACTCCC |
| | | | cleaving enzyme 1 | |
| ASSAY0912 | Hs01932078_s1 | COMMD6 | COMM domain | AGATTAAGATTGACCATTGCTCCTT |
| | | | containing 6 | |
| ASSAY0935 | Hs00991010_m1 | IL1R1 | interleukin 1 | TATTACAGTGTGGAAAATCCTGCAA |
| | | | receptor, type I | |
| ASSAY0960 | Hs00984297_m1 | C1orf175 | chromosome 1 open | AATGAAGTGAAAGCTGCTCTGGATA |
| | | | reading frame 175 | |
| ASSAY0962 | Hs00211306_m1 | DHRS7 | dehydrogenase/reduct- | CTTTAAGAGTGGTGTGGATGCAGAC |
| | | | ase (SDR family) | |
| | | | member 7 | |
| ASSAY0992 | Hs00293951_m1 | LOC375295 | hypothetical protein | CCCCGCTCAGTTCAATATTTCAAGT |
| | | | LOC375295 | |
| ASSAY1000 | Hs00403541_m1 | FAM129C | family with sequence | CTGCCCTGAATCCTTGGGAGACCAT |
| | | | similarity 129, | |
| | | | member C | |
| ASSAY1039 | Hs00425763_m1 | TAF6 | TAF6 RNA polymerase | GAGCCTCCTGCTGAAACACTGTGCT |
| | | | II, TATA box binding | |
| | | | protein (TBP)- | |
| | | | associated factor, | |
| | | | 80 kDa | |
| ASSAY1047 | Hs00398895_m1 | SLMO1 | slowmo homolog 1 | CAATGCAAAGAAGGGGTGGGCTGCT |
| | | | (Drosophila) | |
| ASSAY1077 | Hs01547450_m1 | FIL1L1 | FIP1 like 1 | TAGAAAGTGGACATTCCTCTGGTTA |
| | | | (S. cerevisiae) | |
| ASSAY1081 | Hs00365632_m1 | DGUOK | deoxyguanosine | AGGCTTCTCCCCAGGTTTGTTTGAA |
| | | | kinase | |
| ASSAY1093 | Hs00226352_m1 | ZCCHC6 | zinc finger, CCHC | AAAGGCTCTTCAGGTAGCCTTTCCA |
| | | | domain containing 6 | |

TABLE 11
Informative probes for Retrospective modelling Interperson
L1 versus L2 (AD) (All probes have p-value <0.5)

| Sequence No. | | Gene | | Context Sequence |
|---|---|---|---|---|
| (DiaGenic Probe ID) | Assay ID | Symbol | Gene name | (Oligonucleotide sequence) |
| ASSAY0024 | Hs00191108_m1 | SFRS11 | splicing factor, | CCGCCGGATGATTCGCCTTTGCCAG |
| | | | arginine/serine-rich 11 | |
| ASSAY0037 | Hs00218384_m1 | CAND1 | cullin-associated and | GTACAACTAAGGTAAAGGCAAACTC |
| | | | neddylation- | |
| | | | dissociated 1 | |
| ASSAY0038 | Hs00218782_m1 | RNF114 | ring finger protein 114 | TGCCCTGCGGACACGTCTTTTGCTC |
| ASSAY0039 | Hs00218814_m1 | CMAS | cytidine monophosphate | TCAGAAAGGAGTTCGTGAAGTGACC |
| | | | N-acetylneuraminic acid | |
| | | | synthetase | |
| ASSAY0052 | Hs00220814_m1 | SLC44A2 | solute carrier family | AAACGAGAACAAACCCTATCTGTTT |
| | | | 44, member 2 | |
| ASSAY0066 | Hs00224697_m1 | CASD1 | CAS1 domain | TTTGGCATATTCTCAGGGTGCATTT |
| | | | containing 1 | |
| ASSAY0070 | Hs00225747_m1 | NOTCH2 | Notch homolog 2 | GTGCCTTTACTGGCCGGCACTGTGA |
| | | | (Drosophila) | |
| ASSAY0077 | Hs00227357_m1 | LPCAT1 | lysophosphatidylcholine | GAAGATCACATTCGCTGACTTCCAC |
| | | | acyltranferase 1 | |
| ASSAY0098 | Hs00153519_m1 | MME | membrane metallo- | TCCAGGCAATTTCAGGATTATTGGG |
| | | | endopeptidase | |
| ASSAY0099 | Hs00153853_m1 | ADAM10 | ADAM metallopeptidase | AAACAGTGCAGTCCAAGTCAAGGTC |
| | | | domain 10 | |
| ASSAY0104 | Hs00154683_m1 | DARS | aspartyl-tRNA | GTGGAGGCATTGGATTGGAACGAGT |
| | | | synthetase | |
| ASSAY0126 | Hs00162077_m1 | SOAT1 | sterol O- | CCATCTTGCCAGGTGTGCTGATTCT |
| | | | acyltransferase 1 | |
| ASSAY0140 | Hs00173196_m1 | ZNF146 | zinc finger protein 146 | AGGATCTGCGCGGAAGAAGCCTGAG |
| ASSAY0159 | Hs00176944_m1 | PRKACB | protein kinase, cAMP- | GAGAATCCAACTCAGAATAATGCCG |
| | | | dependent, catalytic, | |
| | | | beta | |
| ASSAY0162 | Hs00177028_m1 | PKN1 | protein kinase N1 | TGGCAGCACCAAGGACCGGAAGCTG |
| ASSAY0164 | Hs00177638_m1 | ADAM9 | ADAM metallopeptidase | TGCCACTGGGAATGCTTTGTGTGGA |
| | | | domain 9 (meltrin | |
| | | | gamma) | |
| ASSAY0165 | Hs00177790_m1 | STK17B | serine/threonine | TGATATTGGAATATGCTGCAGGTGG |
| | | | kinase 17b | |
| ASSAY0174 | Hs00184625_m1 | SMAD2 | SMAD family member 2 | TGGACACAGGCTCTCCAGCAGAACT |
| ASSAY0176 | Hs00184625_m1 | ATP6V1C1 | ATPase, H+ transport- | ACCTTCCTGGAATCTCTCTTGATTT |
| | | | ing, lysosomal 42 kDa, | |
| | | | V1 subunit C1 | |
| ASSAY0210 | Hs00203291_m1 | CCDC106 | coiled-coil domain | CTCGGATGGAGGCAGAGGACCACTG |
| | | | containing 106 | |
| ASSAY0225 | Hs00218331_m1 | KDM3A | lysine (K)-specific | TTCTTAAAAAGGTATCAGAAGAGCA |
| | | | demethylase 3A | |
| ASSAY0230 | Hs00228829_m1 | TNKS2 | tankyrase, TRF1- | TGAAACAGCATTGCATTGTGCTGCT |
| | | | interacting ankyrin- | |
| | | | related ADP-ribose | |
| | | | polymerase 2 | |
| ASSAY0242 | Hs00276830_m1 | RUNDC2A | RUN domain containing | CAGTGAAACAGTGCCAGATCCGCTT |
| | | | 2A | |
| ASSAY0245 | Hs00326671_m1 | TTC14 | tetratricopeptide | AGAGAGAGGAGGACAGTTAGAAGAA |
| | | | repeat domain 14 | |
| ASSAY0256 | Hs00385050_m1 | RNF166 | ring finger protein 166 | GCGGCCACACGTTCTGCGGGGAGTG |
| ASSAY0257 | Hs00397335_m1 | DNAJC13 | DnaJ (Hsp40) homolog, | GGTCCAAAGGTTCGAATTACGTTAA |
| | | | subfamily C, member 13 | |
| ASSAY0258 | Hs00406040_m1 | LYSMD3 | LysM, putative | TTGTACGGTAGCAGATATCAAGAGA |
| | | | peptidoglycan-binding, | |
| | | | domain containing 3 | |
| ASSAY0263 | Hs00606262_g1 | HDAC1 | histone deacetylase 1 | AGGAGAAGAAAGAAGTCACCGAAGA |
| ASSAY0268 | Hs00705337_s1 | RBM39 | RNA binding motif | AACAGCAGCATATGTACCTCTTCCA |
| | | | protein 39 | |
| ASSAY0269 | Hs00743451_s1 | SUB1 | SUB1 homolog | AACTTAATCTCTTCATGTTCAGTTT |
| | | | (S. cerevisiae) | |
| ASSAY0274 | Hs00963664_g1 | UBE3A | ubiquitin protein | TGGGAGACTCTCACCCAGTTCTATA |
| | | | ligase E3A | |
| ASSAY0292 | Hs00195718_m1 | TAX1BP1 | Tax1 (human T-cell | AAACAACTCTTGCAGGATGAGAAAG |
| | | | leukemia virus type I) | |
| | | | binding protein 1 | |
| ASSAY0293 | Hs00196061_m1 | CEPT1 | choline/ethanolamine | ACAGAGCAGGCACCTCTGTGGGCAT |
| | | | phosphotransferase 1 | |
| ASSAY0299 | Hs00197744_m1 | POLR3C | polymerase (RNA) II | CAGATAACAAGGAGCCCATTCCAGA |
| | | | (DNA directed) | |
| | | | polypeptide C (62 kD) | |
| ASSAY0337 | Hs00208459_m1 | N4BP2L2 | NEDD4 binding protein | ATTGTCTCGAATTCTGCTTGGTCAG |
| | | | 2-like 2 | |
| ASSAY0340 | Hs00210194_m1 | SIPA1L1 | signal-induced | ACTAGAGAGGCGGCTGTCTCCTGGT |
| | | | proliferation- | |
| | | | associated 1 like 1 | |
| ASSAY0344 | Hs00211234_m1 | FAM164A | family with sequence | ACATAGCCAGGCCAGATGGGGACTG |
| | | | similarity 164, | |
| | | | member A | |
| ASSAY0352 | Hs00213029_m1 | SIRT7 | sirtuin (silent mating | AATCAGCACGGCAGCGTCTATCCCA |
| | | | type information | |
| | | | regulation 2 homolog) | |
| | | | 7 (S. cerevisiae) | |
| ASSAY0359 | Hs00214745_m1 | DPP8 | dipeptidyl-peptidase 8 | CTGCCTGCTCCAAGTGATTTCAAGT |
| ASSAY0367 | Hs00215976_m1 | ARGLU1 | arginine and glutamate | AGCCAAACTGGCCGAAGAACAGTTG |
| | | | rich 1 | |
| ASSAY0369 | Hs00217022_m1 | ZFP64 | zinc finger protein 64 | AGACAATCACAGTTTCAGCTCCAGA |
| | | | homolog (mouse) | |
| ASSAY0370 | Hs00217272_m1 | NUP133 | nucleoporin 133 kDa | AACTTTTAAAAGATGGCATTCAGCT |
| ASSAY0371 | Hs00217966_m1 | C5orf22 | chromosome 5 open | CTTCAAACCCTGGAATGGAATCACT |
| | | | reading frame 22 | |
| ASSAY0372 | Hs00218079_m1 | FBXL8 | F-box and leucine-rich | CACAAAAATCAGTTGCGAATGTGAG |
| | | | repeat protein 8 | |
| ASSAY0376 | Hs00234404_m1 | FKBP2 | FK506 binding protein | CACTACACGGGGAAGCTGGAAGATG |
| | | | 2, 13 kDa | |
| ASSAY0388 | Hs00262263_m1 | ZDHHC12 | zinc finger, DHHC-type | TGCACGATACCGAGCTGCGGCAATG |
| | | | containing 12 | |
| ASSAY0401 | Hs00385941_m1 | LSM14A | LSM14A, SCD6 homolog A | GCCCTTGCCAAAGTTCGATCCTTTG |
| | | | (S. cerevisiae) | |
| ASSAY0403 | Hs00401096_m1 | SLC35E2 | similar to solute | TGACTTTCAGCGTCGCCAGCACCGT |
| | | | carrier family 35, | |
| | | | member E2 | |
| ASSAY0407 | Hs00540709_s1 | TMEM203 | transmembrane | CGGGAGCTGGTGCAGTGGCTAGGCT |
| | | | protein 203 | |
| ASSAY0421 | Hs00609836_m1 | AARS | alanyl-tRNA synthetase | CAAAATTTGGGGCTGGATGACACCA |
| ASSAY0425 | Hs00610478_m1 | PWP2 | PWP2 periodic | GGCTGGCCAAGTACTTCTTCAATAA |
| | | | tryptophan protein | |
| | | | homolog (yeast) | |
| ASSAY0429 | Hs00611133_m1 | MRPL10 | mitochondrial | CGCTGCTAGGTGGCTGCATTGATGA |
| | | | ribosomal protein L10 | |
| ASSAY0434 | Hs00698392_m1 | ZMYND17 | zinc finger, MYND-type | GTGGCGGCATTCCATCCAGGTTTTC |
| | | | containing 17 | |
| ASSAY0451 | Hs00745818_s1 | ZNF595 | zinc finger protein 595 | CAAAGCTTTTAATCGGCCCTCAACC |
| ASSAY0452 | Hs00747351_mH | CLTA | clathrin, light chain | GGGGTCCGGATGCTGTTGATGGAGT |
| | | | (Lca) | |
| ASSAY0456 | Hs00750443_s1 | ARL8B | ADP-ribosylation | GTGTGACTCTGTGGGGACTGCATAG |
| | | | factor-like 8B | |
| ASSAY0457 | Hs00750732_s1 | ARHGAP5 | Rho GTPase activating | TCTACCAATTCTCAGGCACCAAGGG |
| | | | protein 5 | |
| ASSAY0463 | Hs00762481_s1 | RPL36 | ribosomal protein L36 | CCTTCTCCCCGTCGCTGTCCGCAGC |
| ASSAY0464 | Hs00793391_m1 | CSNK1A1 | casein kinase 1, | AGTTTTATGTAAGGGGTTTCCTGCA |
| | | | alpha 1 | |
| ASSAY0482 | Hs00242770_m1 | MBD1 | methyl-CpG binding | ATTACCAGAGCCCCACAGGAGACAG |
| | | | domain protein 1 | |
| ASSAY0486 | Hs00247895_s1 | LSM14B | LSM14B, SCD6 homolog B | GAGCCTGGGATGAGCCCCGGCAGCG |
| | | | (S. cerevisiae) | |
| ASSAY0494 | Hs00252433_m1 | CDC42SE1 | CDC42 small effector 1 | AGAGCAGGGTTCCGAGTCTGAGGAA |
| ASSAY0499 | Hs00254802_s1 | RBM8A; | RNA binding motif | CCCTTCCTTGTCTGGGGCCTGGACA |
| | | GNRHR2 | protein 8A; gonadot- | |
| | | | ropin-releaseing | |
| | | | hormone (type 2) | |
| | | | receptor 2 | |
| ASSAY0512 | Hs00260786_m1 | ARFGAP2 | ADP-ribosylation factor | GTATCCCGAAGCTCTGTCTCCCACT |
| | | | GTPase activating | |
| | | | protein 2 | |
| ASSAY0521 | Hs00263798_m1 | ALG2 | asparagine-linked | TAGTGTGCGACCAGGTGTCTGCCTG |
| | | | glycosylation 2, alpha- | |
| | | | 1,3-mannosyltransferase | |
| | | | homolog (S. cerevisiae) | |
| ASSAY0533 | Hs00268117_m1 | SDHB | succinate dehydrogenase | TCATGCAGAGAAGGCATCTGTGGCT |
| | | | complex, subunit B, | |
| | | | iron sulful (Ip) | |
| ASSAY0534 | Hs00268265_m1 | SMARCC1 | SWI/SNF related, matrix | CCAAACTCCCTGCAAAGTGTTTCAT |
| | | | associated, actin | |
| | | | dependent regulator of | |
| | | | chromatin, subfamily c, | |
| | | | member 1 | |
| ASSAY0535 | Hs00268342_m1 | SORL1 | sortilin-related | CAACAAGCGGTACATCTTTGCAGAC |
| | | | receptor, L(DLR class) | |
| | | | A repeats-containing | |
| ASSAY0541 | Hs00270620_s1 | IER2 | immediate early | CCCCGCCAAAGTCAGCCGCAAACGA |
| | | | response 2 | |
| ASSAY0558 | Hs00287906_s1 | H3F3B | H3 histone, family 3B | GCTGTATTTGCAGTGTGGGCTAAGA |
| | | | (H3.3B) | |
| ASSAY0562 | Hs00292593_m1 | COMMD7 | COMM domain containing | GGGCGCGCAGCAGTTCTCAGCCCTG |
| | | | 7 | |
| ASSAY0566 | Hs00293370_m1 | SPPL3 | signal peptide | TATTTAAAGGGCGACCTCCGGCGGA |
| | | | peptidase 3 | |
| ASSAY0568 | Hs00298999_m1 | SLC38A10 | solute carrier family | TTCGCCTGCCAGTCCCAGGTGCTGC |
| | | | 38, member 10 | |
| ASSAY0593 | Hs00362511_g1 | SUGT1 | SGT1, suppressor of | CTGCAACATCCCAGAGGTTTTTCCA |
| | | | G2 allele of SKP1 | |
| | | | (S. cerevisiae) | |
| ASSAY0603 | Hs00368207_m1 | PREX1 | phosphatidylinositol- | CTTCTTGCAGTCGGCATTCCTGCAT |
| | | | 3,4,5-triphosphate- | |
| | | | dependent Rac | |
| | | | exchange factor 1 | |
| ASSAY0611 | Hs00371424_s1 | HIST1H4D | histone cluster 1, H4d | TTCGGCGGCTGAGCTTACCTCTACA |
| ASSAY0614 | Hs00373045_m1 | GAB2 | GRB2-associated | GAGAGCACAGACTCCCTGAGAAATG |
| | | | binding protein 2 | |
| ASSAY0621 | Hs00375641_m1 | TOMM40L | translocase of outer | GCTCAGTCCCACTGAGGTGTTCCCC |
| | | | mitochondrial membrane | |
| | | | 40 homolog (yeast)- | |
| | | | like | |
| ASSAY0625 | Hs00378208_m1 | UBR4 | ubiquitin protein | CACTTGCTTGGCAAGACACAACACT |
| | | | ligase E3 component n- | |
| | | | recognin 4 | |
| ASSAY0632 | Hs00379295_m1 | C1orf144 | chromosome 1 open | AACCCATCCTCGACAGGCCAACCAG |
| | | | reading frame 144 | |
| ASSAY0638 | Hs00384448_m1 | PARS2 | prolyl-tRNA synthetase | GGCTGGGATTGCGGTGCCTGTGCTT |
| | | | 2, mitochondrial | |
| | | | (putative) | |
| ASSAY0648 | Hs00389570_m1 | SEC16A | SEC16 homolog A | AACCTAAGAAGGGTGAATCCTGGTT |
| | | | (S. cerevisiae) | |
| ASSAY0654 | Hs00393592_m1 | FZR1 | fizzy/cell division | ACGATGCCACGCGTCACAGAGATGC |
| | | | cycle 20 related 1 | |
| | | | (Drosophila) | |
| ASSAY0661 | Hs00405469_m1 | JMJD1C | jumonji domain | TCAAAAGCAGGAATTCTCAAGAAAT |
| | | | containing 1C | |
| ASSAY0684 | Hs00417273_m1 | LRRK2 | leucine-rich repeat | TTTGGCCCTCCTCACTGAGACTATT |
| | | | kinase 2 | |
| ASSAY0686 | Hs00418955_m1 | SHCHD1 | structural maintenance | AAGGATTTTAAATGGACAGGAACAG |
| | | | of chromosomes | |
| | | | flexible hinge domain | |
| | | | containing 1 | |
| ASSAY0689 | Hs00419820_g1 | LOC728975 | hypothetical protein | CTGCGTGACCTTGGGCTCTCAGCCC |
| | | | LOC728975 | |
| ASSAY0703 | Hs00430402_m1 | PBXIP1 | pre-B-cell leukemia | ACCCCCAAAGCAGCTTGGATCAGGG |
| | | | homeobox interacting | |
| | | | protein 1 | |
| ASSAY0709 | Hs00536594_m1 | MTG1 | mitochondrial GTPase | CAGCGCTTTGGGTACGTGCAGCACT |
| | | | 1 homolog | |
| | | | (S. cerevisiae) | |
| ASSAY0710 | Hs00536891_m1 | ITSN2 | intersectin 2 | GCTATGAATGGAGGGCCAAACATGT |
| ASSAY0714 | Hs00538879_s1 | LUC7L3 | LUC7-like 3 | GTTACACTCAATGCAATTCTCAAGT |
| | | | (S. cerevisiae) | |
| ASSAY0718 | Hs00539707_m1 | DTX2 | deltex homolog 2 | GGCCGCAAGGTCCTAGAGCTCCTGA |
| | | | (Drosophila) | |
| ASSAY0719 | Hs00540753_m1 | DYNLL2 | dynein, light chain, | GCCTCCGTGAAGTGTCACACCATGT |
| | | | LC8-type 2 | |
| ASSAY0720 | Hs00540812_m1 | CCDC101 | coiled-coil domain | AGAGGCTGAGTGCAACATCCTTCGG |
| | | | containing 101 | |
| ASSAY0726 | Hs00543883_s1 | HIST1H4C | histone cluster 1, H4c | TATGGCTTCGGCGGCTGAATCTAAG |
| ASSAY0740 | Hs00606809_g1 | MRPL41 | mitochondrial | TCCGGTCCAGGGCGCGGCATGGGCG |
| | | | ribosomal protein L41 | |
| ASSAY0748 | Hs00830558_g1 | FOXN3 | forkhead box N3 | TCTAGGGACTTGGTGTTGCTTGGAA |
| ASSAY0753 | Hs00855332_g1 | LDHA | lactate dehydrogenase A | TCTGACGCACCACTGCCAATGCTGT |
| ASSAY0754 | Hs00867656_s1 | DLEU2 | deleted in lymphocytic | AAAAATTTATTTTACACATGTCAAG |
| | | | leukemia 2 (non- | |
| | | | protein coding) | |
| ASSAY0758 | Hs00898410_g1 | RPL32P3 | ribosomal protein L32 | GCTGGCAGGCACCATGTCGTCCTGT |
| | | | pseudogene 3 | |
| ASSAY0782 | Hs00945401_m1 | ANXA1 | annexin A1 | TGCCAAGCCATCCTGGATGAAACCA |
| ASSAY0820 | Hs01031740_m1 | ARPC2 | actin related protein | TGAAAACAATCACGGGGAAGACGTT |
| | | | ⅔ complex, subunit 2, | |
| | | | 34 kDa | |
| ASSAY0827 | Hs01037385_s1 | HMGB1 | high-mobility group | AAAGCAAAGGGAGGATAAAACAGTA |
| | | | box 1 | |
| ASSAY0835 | Hs01053640_m1 | TXK | TXK tyrosine kinase | GCTGGCATGAGAAACCTGAAGGCCG |
| ASSAY0836 | Hs01053867_s1 | NCRNA00203 | non-protein coding | AGCGCCAGTGCTGGCATGGGCTTTC |
| | | | RNA 203 | |
| ASSAY0856 | Hs01085351_m1 | STK39 | serine threonine | TAAGTTGGCTTCTGGCTGTGATGGG |
| | | | kinase 39 (STE20/SPS1 | |
| | | | homolog, yeast) | |
| ASSAY0869 | Hs01111764_m1 | UHMK1 | U2AF homology motif | ATCCTGGCAGAGGACAAGTCTTTGT |
| | | | (UHM) kinase 1 | |
| ASSAY0886 | Hs01564142_m1 | GLIPR1 | GLI pathogenesis- | CTATACATGACTTGGGACCCAGCAC |
| | | | related 1 | |
| ASSAY0899 | Hs01632947_g1 | CCDC72 | coiled-coil domain | GGAATTAAGTGTTGTCTTGGAGCTG |
| | | | containing 72 | |
| ASSAY0900 | Hs01636043_s1 | SRP9 | signal recognition | TGCTGTTGTGACCAATAAATATAAA |
| | | | particle 9 kDa | |
| ASSAY0904 | Hs01885851_s1 | LTB4R2 | leukotriene B4 | CTACGGCCTTGGCCTTCTTCAGTTC |
| | | | receptor 2 | |
| ASSAY0912 | Hs01932078_s1 | COMMD6 | COMM domain containing | AGATTAAGATTGACCATTGCTCCTT |
| | | | 6 | |
| ASSAY0919 | Hs02510591_s1 | DPYD | dihydropyrimidine | GATGGGTGTACAAACTCATCCTCTT |
| | | | dehydrogenase | |
| ASSAY0923 | Hs02621508_s1 | TNFAIP8 | tumor necrosis factor, | AAATACAGATGTCTCCAGACCTGAG |
| | | | alpha-induced protein 8 | |
| ASSAY0962 | Hs00211306_m1 | DHRS7 | dehydrogenase/reductase | CTTTAAGAGTGGTGTGGATGCAGAC |
| | | | (SDR family) member 7 | |
| ASSAY0966 | Hs00323799_m1 | RNF160 | ring finger protein 160 | TGAAAAGGCATGTCCTAGTTCAGAT |
| ASSAY1024 | Hs00918650_m1 | CSDE1 | cold shock domain | TAAAAGTAGGAGATGATGTTGAATT |
| | | | containing E1, RNA- | |
| | | | binding | |
| ASSAY1035 | Hs00202392_m1 | SLC39A6 | solute carrier family | CGGAGACGAAGGCGCAATGGCGAGG |
| | | | 39 (zinc transporter), | |
| | | | member 6 | |
| ASSAY1039 | Hs00425763_m1 | TAF6 | TAF6 RNA polymerase | GAGCCTCCTGCTGAAACACTGTGCT |
| | | | II, TATA box binding | |
| | | | protein (TBP)- | |
| | | | associated factor, | |
| | | | 80 kDa | |
| ASSAY1055 | Hs00154952_m1 | EIF4G2 | eukaryotic translation | TGCTGGCAACAGCGAGTTCCTGGGG |
| | | | initiation factor 4 | |
| | | | gamma, 2 | |
| ASSAY1079 | Hs00162564_m1 | TARS | threonyl-tRNA | CGAGGAGAAGCCGATTGGTGCTGGT |
| | | | synthetase | |
| ASSAY1084 | Hs00390223_m1 | UBR4 | ubiquitin protein | ACATGACCACAGGTACAGAATCAGA |
| | | | ligase E3 component n- | |
| | | | recognin 4 | |
| ASSAY1099 | Hs00428461_m1 | CTDSP2 | CTD (carboxy-terminal | CTCACCAAGCAAGGCCTGGTCTCCA |
| | | | domain, RNA polymerase | |
| | | | II, polypeptide A) | |
| | | | small phosphatase 2 | |
| ASSAY1104 | Hs00261330_s1 | NT5DC1 | 5-nucleotidase domain | CTCACCAAGCAAGGCCTGGTCTCCA |
| | | | containing 1 | |

Sequences corresponding to Assay Nos (sequence numbers) are provided in the Sequence Listing. The following table provides the SEQ ID NO: of each of the sequences that correspond to the Assay No.s.

| ASSAY NO | SEQ ID NO. |
|---|---|
| ASSAY0001 | 1 |
| ASSAY0002 | 2 |
| ASSAY0003 | 3 |
| ASSAY0006 | 4 |
| ASSAY0007 | 5 |
| ASSAY0010 | 6 |
| ASSAY0011 | 7 |
| ASSAY0012 | 8 |
| ASSAY0013 | 9 |
| ASSAY0014 | 10 |
| ASSAY0015 | 11 |
| ASSAY0017 | 12 |
| ASSAY0018 | 13 |
| ASSAY0020 | 14 |
| ASSAY0022 | 15 |
| ASSAY0024 | 16 |
| ASSAY0027 | 17 |
| ASSAY0031 | 18 |
| ASSAY0032 | 19 |
| ASSAY0036 | 20 |
| ASSAY0037 | 21 |
| ASSAY0038 | 22 |
| ASSAY0039 | 23 |
| ASSAY0040 | 24 |
| ASSAY0041 | 25 |
| ASSAY0044 | 26 |
| ASSAY0045 | 27 |
| ASSAY0046 | 28 |
| ASSAY0047 | 29 |
| ASSAY0048 | 30 |
| ASSAY0049 | 31 |
| ASSAY0050 | 32 |
| ASSAY0051 | 33 |
| ASSAY0052 | 34 |
| ASSAY0053 | 35 |
| ASSAY0054 | 36 |
| ASSAY0055 | 37 |
| ASSAY0056 | 38 |
| ASSAY0057 | 39 |
| ASSAY0060 | 40 |
| ASSAY0061 | 41 |
| ASSAY0062 | 42 |
| ASSAY0063 | 43 |
| ASSAY0065 | 44 |
| ASSAY0066 | 45 |
| ASSAY0067 | 46 |
| ASSAY0069 | 47 |
| ASSAY0070 | 48 |
| ASSAY0072 | 49 |
| ASSAY0074 | 50 |
| ASSAY0077 | 51 |
| ASSAY0080 | 52 |
| ASSAY0081 | 53 |
| ASSAY0082 | 54 |
| ASSAY0084 | 55 |
| ASSAY0085 | 56 |
| ASSAY0086 | 57 |
| ASSAY0087 | 58 |
| ASSAY0088 | 59 |
| ASSAY0089 | 60 |
| ASSAY0092 | 61 |
| ASSAY0093 | 62 |
| ASSAY0096 | 63 |
| ASSAY0097 | 64 |
| ASSAY0098 | 65 |
| ASSAY0099 | 66 |
| ASSAY0103 | 67 |
| ASSAY0104 | 68 |
| ASSAY0107 | 69 |
| ASSAY0108 | 70 |
| ASSAY0110 | 71 |
| ASSAY0112 | 72 |
| ASSAY0113 | 73 |
| ASSAY0114 | 74 |
| ASSAY0115 | 75 |
| ASSAY0116 | 76 |
| ASSAY0117 | 77 |
| ASSAY0118 | 78 |
| ASSAY0119 | 79 |
| ASSAY0120 | 80 |
| ASSAY0122 | 81 |
| ASSAY0123 | 82 |
| ASSAY0124 | 83 |
| ASSAY0126 | 84 |
| ASSAY0127 | 85 |
| ASSAY0128 | 86 |
| ASSAY0129 | 87 |
| ASSAY0132 | 88 |
| ASSAY0133 | 89 |
| ASSAY0135 | 90 |
| ASSAY0136 | 91 |
| ASSAY0137 | 92 |
| ASSAY0138 | 93 |
| ASSAY0139 | 94 |
| ASSAY0140 | 95 |
| ASSAY0141 | 96 |
| ASSAY0142 | 97 |
| ASSAY0144 | 98 |
| ASSAY0145 | 99 |
| ASSAY0147 | 100 |
| ASSAY0148 | 101 |
| ASSAY0149 | 102 |
| ASSAY0150 | 103 |
| ASSAY0151 | 104 |
| ASSAY0152 | 105 |
| ASSAY0153 | 106 |
| ASSAY0154 | 107 |
| ASSAY0155 | 108 |
| ASSAY0156 | 109 |
| ASSAY0157 | 110 |
| ASSAY0158 | 111 |
| ASSAY0159 | 112 |
| ASSAY0160 | 113 |
| ASSAY0161 | 114 |
| ASSAY0162 | 115 |
| ASSAY0163 | 116 |
| ASSAY0164 | 117 |
| ASSAY0165 | 118 |
| ASSAY0166 | 119 |
| ASSAY0168 | 120 |
| ASSAY0169 | 121 |
| ASSAY0170 | 122 |
| ASSAY0171 | 123 |
| ASSAY0172 | 124 |
| ASSAY0174 | 125 |
| ASSAY0176 | 126 |
| ASSAY0178 | 127 |
| ASSAY0179 | 128 |
| ASSAY0180 | 129 |
| ASSAY0181 | 130 |
| ASSAY0182 | 131 |
| ASSAY0183 | 132 |
| ASSAY0184 | 133 |
| ASSAY0185 | 134 |
| ASSAY0186 | 135 |
| ASSAY0187 | 136 |
| ASSAY0189 | 137 |
| ASSAY0190 | 138 |
| ASSAY0191 | 139 |
| ASSAY0193 | 140 |
| ASSAY0194 | 141 |
| ASSAY0195 | 142 |
| ASSAY0196 | 143 |
| ASSAY0197 | 144 |
| ASSAY0198 | 145 |
| ASSAY0199 | 146 |
| ASSAY0200 | 147 |
| ASSAY0202 | 148 |
| ASSAY0203 | 149 |
| ASSAY0204 | 150 |
| ASSAY0205 | 151 |
| ASSAY0206 | 152 |
| ASSAY0207 | 153 |
| ASSAY0209 | 154 |
| ASSAY0210 | 155 |
| ASSAY0211 | 156 |
| ASSAY0212 | 157 |
| ASSAY0213 | 158 |
| ASSAY0214 | 159 |
| ASSAY0215 | 160 |
| ASSAY0216 | 161 |
| ASSAY0217 | 162 |
| ASSAY0218 | 163 |
| ASSAY0221 | 164 |
| ASSAY0222 | 165 |
| ASSAY0223 | 166 |
| ASSAY0224 | 167 |
| ASSAY0225 | 168 |
| ASSAY0226 | 169 |
| ASSAY0227 | 170 |
| ASSAY0228 | 171 |
| ASSAY0230 | 172 |
| ASSAY0232 | 173 |
| ASSAY0234 | 174 |
| ASSAY0236 | 175 |
| ASSAY0242 | 176 |
| ASSAY0243 | 177 |
| ASSAY0244 | 178 |
| ASSAY0245 | 179 |
| ASSAY0246 | 180 |
| ASSAY0247 | 181 |
| ASSAY0249 | 182 |
| ASSAY0250 | 183 |
| ASSAY0251 | 184 |
| ASSAY0252 | 185 |
| ASSAY0253 | 186 |
| ASSAY0254 | 187 |
| ASSAY0255 | 188 |
| ASSAY0256 | 189 |
| ASSAY0257 | 190 |
| ASSAY0258 | 191 |
| ASSAY0259 | 192 |
| ASSAY0261 | 193 |
| ASSAY0262 | 194 |
| ASSAY0263 | 195 |
| ASSAY0264 | 196 |
| ASSAY0265 | 197 |
| ASSAY0266 | 198 |
| ASSAY0267 | 199 |
| ASSAY0268 | 200 |
| ASSAY0269 | 201 |
| ASSAY0270 | 202 |
| ASSAY0272 | 203 |
| ASSAY0273 | 204 |
| ASSAY0274 | 205 |
| ASSAY0275 | 206 |
| ASSAY0277 | 207 |
| ASSAY0278 | 208 |
| ASSAY0279 | 209 |
| ASSAY0280 | 210 |
| ASSAY0281 | 211 |
| ASSAY0282 | 212 |
| ASSAY0284 | 213 |
| ASSAY0285 | 214 |
| ASSAY0286 | 215 |
| ASSAY0289 | 216 |
| ASSAY0290 | 217 |
| ASSAY0291 | 218 |
| ASSAY0292 | 219 |
| ASSAY0293 | 220 |
| ASSAY0294 | 221 |
| ASSAY0296 | 222 |
| ASSAY0299 | 223 |
| ASSAY0302 | 224 |
| ASSAY0304 | 225 |
| ASSAY0306 | 226 |
| ASSAY0307 | 227 |
| ASSAY0309 | 228 |
| ASSAY0313 | 229 |
| ASSAY0315 | 230 |
| ASSAY0316 | 231 |
| ASSAY0317 | 232 |
| ASSAY0319 | 233 |
| ASSAY0320 | 234 |
| ASSAY0321 | 235 |
| ASSAY0322 | 236 |
| ASSAY0324 | 237 |
| ASSAY0327 | 238 |
| ASSAY0329 | 239 |
| ASSAY0331 | 240 |
| ASSAY0332 | 241 |
| ASSAY0334 | 242 |
| ASSAY0335 | 243 |
| ASSAY0336 | 244 |
| ASSAY0337 | 245 |
| ASSAY0338 | 246 |
| ASSAY0339 | 247 |
| ASSAY0340 | 248 |
| ASSAY0341 | 249 |
| ASSAY0342 | 250 |
| ASSAY0343 | 251 |
| ASSAY0344 | 252 |
| ASSAY0345 | 253 |
| ASSAY0346 | 254 |
| ASSAY0347 | 255 |
| ASSAY0348 | 256 |
| ASSAY0351 | 257 |
| ASSAY0352 | 258 |
| ASSAY0354 | 259 |
| ASSAY0355 | 260 |
| ASSAY0356 | 261 |
| ASSAY0357 | 262 |
| ASSAY0358 | 263 |
| ASSAY0359 | 264 |
| ASSAY0361 | 265 |
| ASSAY0362 | 266 |
| ASSAY0364 | 267 |
| ASSAY0366 | 268 |
| ASSAY0367 | 269 |
| ASSAY0368 | 270 |
| ASSAY0369 | 271 |
| ASSAY0370 | 272 |
| ASSAY0371 | 273 |
| ASSAY0372 | 274 |
| ASSAY0373 | 275 |
| ASSAY0374 | 276 |
| ASSAY0376 | 277 |
| ASSAY0378 | 278 |
| ASSAY0379 | 279 |
| ASSAY0380 | 280 |
| ASSAY0381 | 281 |
| ASSAY0382 | 282 |
| ASSAY0386 | 283 |
| ASSAY0387 | 284 |
| ASSAY0388 | 285 |
| ASSAY0391 | 286 |
| ASSAY0392 | 287 |
| ASSAY0393 | 288 |
| ASSAY0394 | 289 |
| ASSAY0397 | none |
| ASSAY0399 | 290 |
| ASSAY0400 | 291 |
| ASSAY0401 | 292 |
| ASSAY0402 | 293 |
| ASSAY0403 | 294 |
| ASSAY0405 | 295 |
| ASSAY0407 | 296 |
| ASSAY0408 | 297 |
| ASSAY0409 | 298 |
| ASSAY0410 | 299 |
| ASSAY0412 | 300 |
| ASSAY0414 | 301 |
| ASSAY0415 | 302 |
| ASSAY0417 | 303 |
| ASSAY0420 | 304 |
| ASSAY0421 | 305 |
| ASSAY0422 | 306 |
| ASSAY0423 | 307 |
| ASSAY0424 | 308 |
| ASSAY0425 | 309 |
| ASSAY0426 | 310 |
| ASSAY0427 | 311 |
| ASSAY0428 | 312 |
| ASSAY0429 | 313 |
| ASSAY0431 | 314 |
| ASSAY0432 | 315 |
| ASSAY0433 | 316 |
| ASSAY0434 | 317 |
| ASSAY0435 | 318 |
| ASSAY0436 | 319 |
| ASSAY0437 | 320 |
| ASSAY0440 | 321 |
| ASSAY0441 | 322 |
| ASSAY0442 | 323 |
| ASSAY0443 | 324 |
| ASSAY0445 | 325 |
| ASSAY0446 | 326 |
| ASSAY0449 | 327 |
| ASSAY0450 | 328 |
| ASSAY0451 | 329 |
| ASSAY0452 | 330 |
| ASSAY0453 | 331 |
| ASSAY0455 | 332 |
| ASSAY0456 | 333 |
| ASSAY0457 | 334 |
| ASSAY0458 | 335 |
| ASSAY0459 | 336 |
| ASSAY0460 | 337 |
| ASSAY0461 | 338 |
| ASSAY0463 | 339 |
| ASSAY0464 | 340 |
| ASSAY0465 | 341 |
| ASSAY0467 | 342 |
| ASSAY0472 | 343 |
| ASSAY0473 | 344 |
| ASSAY0474 | 345 |
| ASSAY0476 | 346 |
| ASSAY0477 | 347 |
| ASSAY0478 | 348 |
| ASSAY0479 | 349 |
| ASSAY0480 | 350 |
| ASSAY0481 | 351 |
| ASSAY0482 | 352 |
| ASSAY0483 | 353 |
| ASSAY0484 | 354 |
| ASSAY0485 | 355 |
| ASSAY0486 | 356 |
| ASSAY0487 | 357 |
| ASSAY0488 | 358 |
| ASSAY0489 | 359 |
| ASSAY0491 | 360 |
| ASSAY0494 | 361 |
| ASSAY0495 | 362 |
| ASSAY0497 | 363 |
| ASSAY0499 | 364 |
| ASSAY0500 | 365 |
| ASSAY0501 | 366 |
| ASSAY0502 | 367 |
| ASSAY0504 | 368 |
| ASSAY0506 | 369 |
| ASSAY0507 | 370 |
| ASSAY0509 | 371 |
| ASSAY0510 | 372 |
| ASSAY0511 | 373 |
| ASSAY0512 | 374 |
| ASSAY0513 | 375 |
| ASSAY0514 | 376 |
| ASSAY0516 | 377 |
| ASSAY0517 | 378 |
| ASSAY0518 | 379 |
| ASSAY0521 | 380 |
| ASSAY0523 | 381 |
| ASSAY0524 | 382 |
| ASSAY0526 | 383 |
| ASSAY0527 | 384 |
| ASSAY0531 | 385 |
| ASSAY0532 | 386 |
| ASSAY0533 | 387 |
| ASSAY0534 | 388 |
| ASSAY0535 | 389 |
| ASSAY0537 | 390 |
| ASSAY0538 | 391 |
| ASSAY0539 | 392 |
| ASSAY0540 | 393 |
| ASSAY0541 | 394 |
| ASSAY0542 | 395 |
| ASSAY0543 | 396 |
| ASSAY0544 | 397 |
| ASSAY0545 | 398 |
| ASSAY0546 | 399 |
| ASSAY0547 | 400 |
| ASSAY0548 | 401 |
| ASSAY0549 | 402 |
| ASSAY0550 | 403 |
| ASSAY0551 | 404 |
| ASSAY0552 | 405 |
| ASSAY0553 | 406 |
| ASSAY0555 | none |
| ASSAY0558 | 407 |
| ASSAY0559 | 408 |
| ASSAY0560 | 409 |
| ASSAY0561 | 410 |
| ASSAY0562 | 411 |
| ASSAY0563 | 412 |
| ASSAY0565 | 413 |
| ASSAY0566 | 414 |
| ASSAY0567 | 415 |
| ASSAY0568 | 416 |
| ASSAY0569 | 417 |
| ASSAY0570 | 418 |
| ASSAY0572 | 419 |
| ASSAY0573 | 420 |
| ASSAY0574 | 421 |
| ASSAY0575 | 422 |
| ASSAY0576 | 423 |
| ASSAY0577 | 424 |
| ASSAY0578 | 425 |
| ASSAY0579 | 426 |
| ASSAY0580 | 427 |
| ASSAY0582 | 428 |
| ASSAY0583 | 429 |
| ASSAY0584 | 430 |
| ASSAY0585 | 431 |
| ASSAY0587 | 432 |
| ASSAY0588 | 433 |
| ASSAY0591 | 434 |
| ASSAY0593 | 435 |
| ASSAY0596 | 436 |
| ASSAY0597 | 437 |
| ASSAY0598 | 438 |
| ASSAY0599 | 439 |
| ASSAY0600 | 440 |
| ASSAY0601 | 441 |
| ASSAY0603 | 442 |
| ASSAY0604 | 443 |
| ASSAY0607 | 444 |
| ASSAY0608 | 445 |
| ASSAY0611 | 446 |
| ASSAY0612 | 447 |
| ASSAY0613 | 448 |
| ASSAY0614 | 449 |
| ASSAY0615 | 450 |
| ASSAY0616 | 451 |
| ASSAY0617 | 452 |
| ASSAY0618 | 453 |
| ASSAY0619 | 454 |
| ASSAY0621 | 455 |
| ASSAY0623 | 456 |
| ASSAY0624 | 457 |
| ASSAY0625 | 458 |
| ASSAY0626 | 459 |
| ASSAY0627 | 460 |
| ASSAY0628 | 461 |
| ASSAY0629 | 462 |
| ASSAY0632 | 463 |
| ASSAY0633 | 434 |
| ASSAY0634 | 465 |
| ASSAY0637 | 466 |
| ASSAY0638 | 467 |
| ASSAY0640 | 468 |
| ASSAY0641 | 469 |
| ASSAY0642 | 470 |
| ASSAY0643 | 471 |
| ASSAY0644 | 472 |
| ASSAY0645 | 473 |
| ASSAY0647 | 474 |
| ASSAY0648 | 475 |
| ASSAY0649 | 476 |
| ASSAY0650 | 477 |
| ASSAY0651 | 478 |
| ASSAY0653 | 479 |
| ASSAY0654 | 480 |
| ASSAY0655 | 481 |
| ASSAY0656 | 482 |
| ASSAY0657 | 483 |
| ASSAY0659 | 484 |
| ASSAY0660 | 485 |
| ASSAY0661 | 486 |
| ASSAY0662 | 487 |
| ASSAY0664 | 488 |
| ASSAY0665 | 489 |
| ASSAY0666 | 490 |
| ASSAY0667 | 491 |
| ASSAY0668 | 492 |
| ASSAY0669 | 493 |
| ASSAY0670 | 494 |
| ASSAY0671 | 495 |
| ASSAY0672 | 496 |
| ASSAY0673 | 497 |
| ASSAY0674 | 498 |
| ASSAY0675 | 499 |
| ASSAY0676 | 500 |
| ASSAY0677 | 501 |
| ASSAY0678 | 502 |
| ASSAY0679 | 503 |
| ASSAY0682 | 504 |
| ASSAY0683 | 505 |
| ASSAY0684 | 506 |
| ASSAY0686 | 507 |
| ASSAY0687 | 508 |
| ASSAY0689 | 509 |
| ASSAY0691 | 510 |
| ASSAY0692 | 511 |
| ASSAY0693 | 512 |
| ASSAY0695 | 513 |
| ASSAY0696 | 514 |
| ASSAY0697 | 515 |
| ASSAY0698 | 516 |
| ASSAY0699 | 517 |
| ASSAY0701 | 518 |
| ASSAY0702 | 519 |
| ASSAY0703 | 520 |
| ASSAY0704 | 521 |
| ASSAY0706 | 522 |
| ASSAY0709 | 523 |
| ASSAY0710 | 524 |
| ASSAY0712 | 525 |
| ASSAY0713 | 526 |
| ASSAY0714 | 527 |
| ASSAY0715 | 528 |
| ASSAY0716 | 529 |
| ASSAY0718 | 530 |
| ASSAY0719 | 531 |
| ASSAY0720 | 532 |
| ASSAY0722 | 533 |
| ASSAY0723 | 534 |
| ASSAY0724 | 535 |
| ASSAY0725 | 536 |
| ASSAY0726 | 537 |
| ASSAY0727 | 538 |
| ASSAY0728 | 539 |
| ASSAY0729 | 540 |
| ASSAY0733 | 541 |
| ASSAY0734 | 542 |
| ASSAY0736 | 543 |
| ASSAY0739 | 544 |
| ASSAY0740 | 545 |
| ASSAY0741 | 546 |
| ASSAY0743 | 547 |
| ASSAY0744 | 548 |
| ASSAY0745 | 549 |
| ASSAY0746 | 550 |
| ASSAY0748 | 551 |
| ASSAY0749 | 552 |
| ASSAY0750 | 553 |
| ASSAY0751 | 554 |
| ASSAY0752 | 555 |
| ASSAY0753 | 556 |
| ASSAY0754 | 557 |
| ASSAY0755 | 558 |
| ASSAY0756 | 559 |
| ASSAY0758 | 560 |
| ASSAY0759 | 561 |
| ASSAY0760 | 562 |
| ASSAY0762 | 563 |
| ASSAY0763 | 564 |
| ASSAY0766 | 565 |
| ASSAY0767 | 566 |
| ASSAY0771 | 567 |
| ASSAY0772 | 568 |
| ASSAY0773 | 569 |
| ASSAY0774 | 570 |
| ASSAY0778 | 571 |
| ASSAY0780 | 572 |
| ASSAY0781 | 573 |
| ASSAY0782 | 574 |
| ASSAY0784 | 575 |
| ASSAY0785 | 576 |
| ASSAY0786 | 577 |
| ASSAY0790 | 578 |
| ASSAY0792 | 579 |
| ASSAY0793 | 580 |
| ASSAY0794 | 581 |
| ASSAY0795 | 582 |
| ASSAY0797 | 583 |
| ASSAY0798 | 584 |
| ASSAY0799 | 585 |
| ASSAY0801 | 586 |
| ASSAY0802 | 587 |
| ASSAY0804 | 588 |
| ASSAY0805 | 589 |
| ASSAY0806 | 590 |
| ASSAY0807 | 591 |
| ASSAY0809 | 592 |
| ASSAY0810 | 593 |
| ASSAY0811 | 594 |
| ASSAY0814 | 595 |
| ASSAY0817 | 596 |
| ASSAY0818 | 597 |
| ASSAY0819 | 598 |
| ASSAY0820 | 599 |
| ASSAY0821 | 600 |
| ASSAY0822 | 601 |
| ASSAY0826 | 602 |
| ASSAY0827 | 603 |
| ASSAY0831 | 604 |
| ASSAY0833 | 605 |
| ASSAY0834 | 606 |
| ASSAY0835 | 607 |
| ASSAY0836 | 608 |
| ASSAY0838 | 609 |
| ASSAY0841 | 610 |
| ASSAY0842 | 611 |
| ASSAY0843 | 612 |
| ASSAY0844 | 613 |
| ASSAY0846 | 614 |
| ASSAY0847 | 615 |
| ASSAY0850 | 616 |
| ASSAY0853 | 617 |
| ASSAY0854 | 618 |
| ASSAY0856 | 619 |
| ASSAY0857 | 620 |
| ASSAY0858 | 621 |
| ASSAY0859 | 622 |
| ASSAY0861 | 623 |
| ASSAY0862 | 624 |
| ASSAY0863 | 625 |
| ASSAY0865 | 626 |
| ASSAY0866 | 627 |
| ASSAY0867 | 628 |
| ASSAY0869 | 629 |
| ASSAY0871 | 630 |
| ASSAY0874 | 631 |
| ASSAY0876 | 632 |
| ASSAY0878 | 633 |
| ASSAY0879 | 634 |
| ASSAY0882 | 635 |
| ASSAY0883 | 636 |
| ASSAY0885 | 637 |
| ASSAY0886 | 638 |
| ASSAY0887 | 639 |
| ASSAY0888 | 640 |
| ASSAY0893 | 641 |
| ASSAY0894 | 642 |
| ASSAY0895 | 643 |
| ASSAY0897 | 644 |
| ASSAY0899 | 645 |
| ASSAY0900 | 646 |
| ASSAY0903 | 647 |
| ASSAY0904 | 648 |
| ASSAY0906 | 649 |
| ASSAY0907 | 650 |
| ASSAY0910 | 651 |
| ASSAY0911 | 652 |
| ASSAY0912 | 653 |
| ASSAY0913 | 654 |
| ASSAY0914 | 655 |
| ASSAY0916 | 656 |
| ASSAY0917 | 657 |
| ASSAY0919 | 658 |
| ASSAY0921 | 659 |
| ASSAY0922 | 660 |
| ASSAY0923 | 661 |
| ASSAY0924 | 662 |
| ASSAY0925 | 663 |
| ASSAY0927 | 664 |
| ASSAY0928 | 665 |
| ASSAY0929 | 666 |
| ASSAY0931 | 667 |
| ASSAY0933 | 668 |
| ASSAY0934 | 669 |
| ASSAY0935 | 670 |
| ASSAY0936 | 671 |
| ASSAY0938 | 672 |
| ASSAY0939 | 673 |
| ASSAY0941 | 674 |
| ASSAY0943 | 675 |
| ASSAY0944 | 676 |
| ASSAY0947 | 677 |
| ASSAY0948 | 678 |
| ASSAY0950 | 679 |
| ASSAY0951 | 680 |
| ASSAY0953 | 681 |
| ASSAY0957 | 682 |
| ASSAY0959 | 683 |
| ASSAY0960 | 684 |
| ASSAY0962 | 685 |
| ASSAY0964 | 686 |
| ASSAY0966 | 687 |
| ASSAY0968 | 688 |
| ASSAY0969 | 689 |
| ASSAY0970 | 690 |
| ASSAY0971 | 691 |
| ASSAY0976 | 692 |
| ASSAY0978 | 693 |
| ASSAY0980 | 694 |
| ASSAY0982 | 695 |
| ASSAY0983 | 696 |
| ASSAY0985 | 697 |
| ASSAY0986 | 698 |
| ASSAY0987 | 699 |
| ASSAY0988 | 700 |
| ASSAY0990 | 701 |
| ASSAY0992 | 702 |
| ASSAY0994 | 703 |
| ASSAY0996 | 704 |
| ASSAY0997 | 705 |
| ASSAY0998 | 706 |
| ASSAY1000 | 707 |
| ASSAY1001 | 708 |
| ASSAY1002 | 709 |
| ASSAY1004 | 710 |
| ASSAY1006 | 711 |
| ASSAY1007 | 712 |
| ASSAY1010 | 713 |
| ASSAY1011 | 714 |
| ASSAY1012 | 715 |
| ASSAY1014 | 716 |
| ASSAY1017 | 717 |
| ASSAY1018 | 718 |
| ASSAY1019 | 719 |
| ASSAY1022 | 720 |
| ASSAY1023 | 721 |
| ASSAY1024 | 722 |
| ASSAY1025 | 723 |
| ASSAY1026 | 724 |
| ASSAY1029 | 725 |
| ASSAY1030 | 726 |
| ASSAY1033 | 727 |
| ASSAY1035 | 728 |
| ASSAY1036 | 729 |
| ASSAY1037 | 730 |
| ASSAY1039 | 731 |
| ASSAY1040 | 732 |
| ASSAY1041 | 733 |
| ASSAY1042 | 734 |
| ASSAY1044 | 735 |
| ASSAY1045 | 736 |
| ASSAY1046 | 737 |
| ASSAY1047 | 738 |
| ASSAY1048 | 739 |
| ASSAY1051 | 740 |
| ASSAY1052 | 741 |
| ASSAY1053 | 742 |
| ASSAY1055 | 743 |
| ASSAY1056 | 744 |
| ASSAY1057 | 745 |
| ASSAY1058 | 746 |
| ASSAY1059 | 747 |
| ASSAY1061 | 748 |
| ASSAY1063 | 749 |
| ASSAY1064 | 750 |
| ASSAY1065 | 751 |
| ASSAY1066 | 752 |
| ASSAY1071 | 753 |
| ASSAY1074 | 754 |
| ASSAY1075 | 755 |
| ASSAY1077 | 756 |
| ASSAY1078 | 757 |
| ASSAY1079 | 758 |
| ASSAY1081 | 759 |
| ASSAY1082 | 760 |
| ASSAY1083 | 761 |
| ASSAY1084 | 762 |
| ASSAY1086 | 763 |
| ASSAY1087 | 764 |
| ASSAY1088 | 765 |
| ASSAY1090 | 766 |
| ASSAY1093 | 767 |
| ASSAY1094 | 768 |
| ASSAY1095 | 769 |
| ASSAY1096 | 770 |
| ASSAY1097 | 771 |
| ASSAY1099 | 772 |
| ASSAY1100 | 773 |
| ASSAY1101 | 774 |
| ASSAY1102 | 775 |
| ASSAY1103 | 776 |
| ASSAY1104 | 777 |

MEGA

1. A set of oligonucleotide probes, wherein said set comprises at least 10 oligonucleotides, wherein each of said 10 oligonucleotides, which are each different, are selected from:
(a) an oligonucleotide which is a part of a sequence as set forth in any one of Tables 1 to 11;
(b) an oligonucleotide derived from a sequence as set forth in any one of Tables 1 to 11;
(c) an oligonucleotide with a sequence complementary to the sequence of the oligonucleotide of a) or b); or
(d) an oligonucleotide which is functionally equivalent to an oligonucleotide as defined in (a), (b) or (c).

2. A set as claimed in claim 1 wherein said set comprises at least 30 oligonucleotides selected from a) to d).

3. A set as claimed in claim 1 wherein said set comprises oligonucleotides from all of the sequences set forth in any one of Tables 1 to 11, or derived, complementary or functionally equivalent oligonucleotides thereof.

4. A set as claimed in claim 1 wherein said oligonucleotide in (a) is all or a part of the oligonucleotide sequence as set forth in any one of Tables 2 to 11.

5. A set of oligonucleotide probes as claimed in claim 1, wherein each probe in said set binds to a different transcript.

6-7. (canceled)

8. A set as claimed in claim 1 wherein said at least 10 oligonucleotides selected from a) to d) comprise oligonucleotides from all of the sequences set forth in Table 3, or derived, complementary or functionally equivalent oligonucleotides thereof and oligonucleotides selected from a) to d) from sequences set forth in Table 2 which exhibit a p-value of <0.5, or derived, complementary or functionally equivalent oligonucleotides thereof.

9. A set as claimed in claim 1 wherein said at least 10 oligonucleotides selected from a) to d) comprise oligonucleotides from sequences which are set forth in both Tables 2 and 3 (or Tables 9 and 10) or derived, complementary or functionally equivalent oligonucleotides thereof.

10. A set as claimed in claim 1 consisting of from 10 to 500 oligonucleotide probes.

11. A set of oligonucleotide probes as claimed in claim 1, wherein each of said oligonucleotide probes is from 15 to 200 bases in length.

12. A set of oligonucleotide probes as claimed in claim 1, wherein said probes are immobilized on one or more solid supports.

13. (canceled)

14. A kit comprising a set of oligonucleotide probes as defined in claim 12 immobilized on one or more solid supports.

15-16. (canceled)

17. A method of using a set of oligonucleotide probes of claim 1 to determine the gene expression pattern of a cell or sample where the pattern reflects the level of gene expression of genes to which said oligonucleotide probes bind, comprising:
a) isolating mRNA from said cell or sample, which may optionally be reverse transcribed to cDNA;
b) hybridizing the mRNA or cDNA of step (a) to the set of oligonucleotide probes; and
c) assessing the amount of mRNA or cDNA hybridizing to each of said probes to produce said pattern,
wherein the oligonucleotides in said set of oligonucleotide probes are primary oligonucleotides and said set may additionally comprise secondary oligonucleotides which are not assessed in step c).

18. A method of preparing a standard gene transcript pattern characteristic of a neurological disease or condition with a specific stage or progression profile in an organism comprising at least the steps of:
a) isolating mRNA from a blood sample (e.g. containing cells) of one or more organisms having said neurological disease or condition with a specific stage or progression profile, which may optionally be reverse transcribed to cDNA;
b) hybridizing the mRNA or cDNA of step (a) to a set of oligonucleotide probes as defined in claim 1 specific for said neurological disease or condition with a specific stage or progression profile in an organism and sample thereof corresponding to the organism and sample thereof under investigation; and
c) assessing the amount of mRNA or cDNA hybridizing to each of said probes to produce a characteristic pattern reflecting the level of gene expression of genes to which said oligonucleotides bind, in the sample with said neurological disease or condition with a specific stage or progression profile.

19. A method of preparing a test gene transcript pattern comprising at least the steps of:
a) isolating mRNA from a blood sample (e.g. containing cells) of said test organism, which may optionally be reverse transcribed to cDNA;
b) hybridizing the mRNA or cDNA of step (a) to a set of oligonucleotide probes as defined in claim 1 specific for a specific stage or progression profile of a neurological disease or condition in an organism and sample thereof corresponding to the organism and sample thereof under investigation; and
c) assessing the amount of mRNA or cDNA hybridizing to each of said probes to produce said pattern reflecting the level of gene expression of genes to which said oligonucleotides bind, in said test sample.

20. A method of diagnosing or identifying or monitoring a specific stage or progression profile of a neurological disease or condition in an organism, comprising the steps of:
a) isolating mRNA from a blood sample (e.g. containing cells) of said organism, which may optionally be reverse transcribed to cDNA;
b) hybridizing the mRNA or cDNA of step (a) to a set of oligonucleotide probes as defined in claim 1 specific for a specific stage or progression profile of a neurological disease or condition in an organism and sample thereof corresponding to the organism and sample thereof under investigation;
c) assessing the amount of mRNA or cDNA hybridizing to each of said probes to produce a characteristic pattern reflecting the level of gene expression of genes to which said oligonucleotides bind, in said sample; and
d) comparing said pattern to a standard diagnostic pattern prepared according to steps e) through g) below using a sample from an organism corresponding to the organism and sample under investigation to determine the degree of correlation indicative of the presence of a specific stage or progression profile of a neurological disease or condition in the organism under investigation, said steps e) through g) comprising at least the steps of:
e) isolating mRNA from a blood sample (e.g. containing cells) of one or more organisms having said neurological disease or condition with a specific stage or progression profile, which may optionally be reverse transcribed to cDNA;
f) hybridizing the mRNA or cDNA of step (a) to a set of oligonucleotide probes as defined in claim 1 specific for said neurological disease or condition with a specific stage or progression profile in an organism and sample thereof corresponding to the organism and sample thereof under investigation; and
g) assessing the amount of mRNA or cDNA hybridizing to each of said probes to produce a characteristic pattern reflecting the level of gene expression of genes to which said oligonucleotides bind, in the sample with said neurological disease or condition with a specific stage or progression profile.

21. A method of diagnosing or identifying a specific progression profile of a neurological disease or condition in an organism, comprising the steps of:
a) isolating mRNA from a blood sample (e.g. containing cells) of said organism, which may optionally be reverse transcribed to cDNA;
b) hybridizing the mRNA or cDNA of step (a) to a set of oligonucleotides or a kit comprising oligonucleotides specific for a specific progression profile of a neurological disease or condition in an organism and sample thereof corresponding to the organism and sample thereof under investigation;
c) assessing the amount of mRNA or cDNA hybridizing to each of said probes to produce a characteristic pattern reflecting the level of gene expression of genes to which said oligonucleotides bind, in said sample; and
d) comparing said pattern to a standard diagnostic pattern prepared according to claim 18 using a sample from an organism corresponding to the organism and sample under investigation and a set of oligonucleotides or a kit as defined in step b) to determine the degree of correlation indicative of the presence of a specific progression profile of a neurological disease or condition in the organism under investigation.

22. A method of determining the efficacy of a treatment of a neurological disease or condition in an organism, comprising performing steps of a) to d) of the method of claim 20, before, during, and/or after treatment of said neurological condition or disease in said organism to determine the efficacy of said treatment.

23. A method of monitoring the progression of a neurological disease or condition in an organism, comprising the steps of:
a) isolating mRNA from a blood sample (e.g. containing cells) of said organism, which may optionally be reverse transcribed to cDNA;
b) hybridizing the mRNA or cDNA of step (a) to a set of oligonucleotide probes as defined in claim 1 specific for a specific stage of a neurological disease or condition in an organism and sample thereof corresponding to the organism and sample thereof under investigation;
c) assessing the amount of mRNA or cDNA hybridizing to each of said probes to produce a characteristic pattern reflecting the level of gene expression of genes to which said oligonucleotides bind, in said sample;
d) comparing said pattern to a standard diagnostic pattern prepared according to steps g) through i) below using a sample from an organism corresponding to the organism and sample under investigation to determine the degree of correlation indicative of the specific stage of a neurological disease or condition in the organism under investigation;
e) after a time interval, repeating steps a) to d);
f) comparing the specific stage of the disease or condition identified before and after the time interval to establish the progression of said disease or condition, said steps g) through i) comprising at least the steps of:
g) isolating mRNA from a blood sample (e.g. containing cells) of one or more organisms having said neurological disease or condition with a specific stage or progression profile, which may optionally be reverse transcribed to cDNA;
h) hybridizing the mRNA or cDNA of step (a) to a set of oligonucleotide probes as defined in claim 1 specific for said neurological disease or condition with a specific stage or progression profile in an organism and sample thereof corresponding to the organism and sample thereof under investigation; and
i) assessing the amount of mRNA or cDNA hybridizing to each of said probes to produce a characteristic pattern reflecting the level of gene expression of genes to which said oligonucleotides bind, in the sample with said neurological disease or condition with a specific stage or progression profile.

24. A method as claimed in claim 17 wherein said probes are primers and in step b) said mRNA or cDNA or a part thereof is amplified using said primers and in step c) the amount of amplified product is assessed to produce said pattern.

25. A method as claimed in claim 17 wherein said probes are labeling probes and pairs of primers and in step b) said labeling probes and primers are hybridized to said mRNA or cDNA and said mRNA or cDNA or a part thereof is amplified using said primers, wherein when said labeling probe binds to the target sequence it is displaced during amplification thereby generating a signal and in step c) the amount of signal generated is assessed to produce said pattern.

26-28. (canceled)

29. A method of identifying a compound suitable for the treatment of a neurodegenerative condition or disease or a specific stage or progression profile thereof in an organism comprising the steps of:
a) identifying the stage or progression profile of said organism by the method of claim 20,
b) administering said compound to said organism,
c) repeating step a) after step b),
d) comparing the stages or progression profiles identified in steps a) and c) to determine if any therapeutic benefit is observed in said organism relative to a comparable organism not treated by said compound.

30-32. (canceled)

33. A method as claimed in claim 17 wherein said organism is a eukaryotic organism, preferably a mammal.

34. A method as claimed in claim 33 wherein said organism is a human.

35. (canceled)

36. A method as claimed in claim 17 wherein said sample is peripheral blood.

37. A method as claimed in claim 20 wherein said neurological disease or condition is Alzheimer's disease.

38. A method as claimed in claim 20 wherein said neurological disease or condition is MCI.

39. A method as claimed in claim 20 wherein said stage of said neurological disease or condition is prodromal Alzheimer's disease.

40. A method as claimed in claim 20 wherein said stage of said neurological disease or condition is stable MCI.

41. A method as claimed in claim 20 wherein said progression profile of said neurological disease or condition is predictive of clear progression of dementia, preferably Alzheimer's disease.

42. A method as claimed in claim 38 wherein said probes are from Tables 2, 3, 4 and/or 6.

43. A method as claimed in claim 41 wherein said probes are from Tables 9, 10 and/or 11.

The application's sequence listing, which the Patent Office published only in electronic form, follows.

SEQUENCE LISTING (777 sequences)

SEQ ID NO: 1 - DNA, 3417 bp, Homo sapiens
cggaggcagcgagaaagcgcagccaggcggctgctcggcgttctctcaggtgactgctcggagttctcccagtgtttggtgttgcaagcaggatccaaaggagacctatagtgactcccaggagctcttagtgaccaagtgaaggtacctgtggggctcattgtgcccattgctctttcactgctttcaactggtagttgtgggttgaagcactggacaatgccacatactttgtggatggtgtgggtcttgggggtcatcatcagcctctccaaggaagaatcctccaatcaggcttctctgtcttgtgaccgcaatggtatctgcaagggcagctcaggatctttaaactccattccctcagggctcacagaagctgtaaaaagccttgacctgtccaacaacaggatcacctacattagcaacagtgacctacagaggtgtgtgaacctccaggctctggtgctgacatccaatggaattaacacaatagaggaagattctttttcttccctgggcagtcttgaacatttagacttatcctataattacttatctaatttatcgtcttcctggttcaagcccctttcttctttaacattcttaaacttactgggaaatccttacaaaaccctaggggaaacatctcttttttctcatctcacaaaattgcaaatcctgagagtgggaaatatggacaccttcactaagattcaaagaaaagattttgctggacttaccttccttgaggaacttgagattgatgcttcagatctacagagctatgagccaaaaagtttgaagtcaattcagaatgtaagtcatctgatccttcatatgaagcagcatattttactgctggagatttttgtagatgttacaagttccgtggaatgtttggaactgcgagatactgatttggacactttccatttttcagaactatccactggtgaaacaaattcattgattaaaaagtttacatttagaaatgtgaaaatcaccgatgaaagtttgtttcaggttatgaaacttttgaatcagatttctggattgttagaattagagtttgatgactgtacccttaatggagttggtaattttagagcatctgataatgacagagttatagatccaggtaaagtggaaacgttaacaatccggaggctgcatattccaaggttttacttattttatgatctgagcactttatattcacttacagaaagagttaaaagaatcacagtagaaaacagtaaagtttttctggttccttgtttactttcacaacatttaaaatcattagaatacttggatctcagtgaaaatttgatggttgaagaatacttgaaaaattcagcctgtgaggatgcctggccctctctacaaactttaattttaaggcaaaatcatttggcatcattggaaaaaaccggagagactttgctcactctgaaaaacttgactaacattgatatcagtaagaatagttttcattctatgcctgaaacttgtcagtggccagaaaagatgaaatatttgaacttatccagcacacgaatacacagtgtaacaggctgcattcccaagacactggaaattttagatgttagcaacaacaatctcaatttattttctttgaatttgccgcaactcaaagaactttatatttccagaaataagttgatgactctaccagatgcctccctcttacccatgttactagtattgaaaatcagtaggaatgcaataactacgttttctaaggagcaacttgactcatttcacacactgaagactttggaagctggtggcaataacttcatttgctcctgtgaattcctctccttcactcaggagcagcaagcactggccaaagtcttgattgattggccagcaaattacctgtgtgactctccatcccatgtgcgtggccagcaggttcaggatgtccgcctctcggtgtcggaatgtcacaggacagcactggtgtctggcatgtgctgtgctctgttcctgctgatcctgctcacgggggtcctgtgccaccgtttccatggcctgtggtatatgaaaatgatgtgggcctggctccaggccaaaaggaagcccaggaaagctcccagcaggaacatctgctatgatgcatttgtttcttacagtgagcgggatgcctactgggtggagaaccttatggtccaggagctggagaacttcaatccccccttcaagttgtgtcttcataagcgggacttcattcctggcaagtggatcattgacaatatcattgactccattgaaaagagccacaaaactgtctttgtgctttctgaaaactttgtgaagagtgagtggtgcaagtatgaactggacttctcccatttccgtctttttgatgagaacaatgatgctgccattctcattcttctggagcccattgagaaaaaagccattccccagcgcttctgcaagctgcggaagataatgaacaccaagacctacctggagtggcccatggacgaggctcagcgggaaggattttgggtaaatctgagagctgcgataaagtcctaggttcccatatttaagaccagtctttgtctagttgggatctttatgtcactagttatagttaagttcattcagacataattatataaaaactacgtggatgtaccgtcatttgaggacttgcttactaaaactacaaaacttcaaattttgtctggggtgctgttttataaacatatgccagatttaaaaattggtttttggtttttcttttttctatgagataaccatgatcataagtctattactgatatctgaatatagtcccttggtatccaagggaattggttgcaggatcctcgtggatatcaaaattcatagatgatcaagtcccttataagagtggcatagtatttgcatataacctgtgtacattctcctgtatactttaaatcatctctagattacttatgatacccaatacaatgtaaatactatgtaaatagttgtactgtctttttatttatattattattgttattttttattttcaaaatttttaaaacatacttttgatccacagttggttgacttcatggatgcagaacccatggatatagagggccaactgtaatctgtagcaactggcttagttcattaggaaacagcacaaatgaacttaagattctcaatgactgtgtcattctttcttcctgctaagagactcctctgtggccacaaaaggcattctctgtcctacctagctgtcacttctctgtgcagctgatctcaagagcaacaaggcaaagtatttggggcactccccaaaacttgttgctattcctagaaaaaagtgctgtgtatttcctattaaactttacaggatgagaaaaaaaaaaaaaaaaa

SEQ ID NO: 2 - DNA, 5619 bp, Homo sapiens
cagcccgccactgccacccggccccgtgcgctcattggtcgggatgtgtcggctcagcagcctccaacttctcccgaatcccactgattttaggtgatgggcaagtcagaaagtcagatggatataactgatatcaacactccaaagccaaagaagaaacagcgatggactccactggagatcagcctctcggtccttgtcctgctcctcaccatcatagctgtgacaatgatcgcactctatgcaacctacgatgatggtatttgcaagtcatcagactgcataaaatcagctgctcgactgatccaaaacatggatgccaccactgagccttgtacagactttttcaaatatgcttgcggaggctggttgaaacgtaatgtcattcccgagaccagctcccgttacggcaactttgacattttaagagatgaactagaagtcgttttgaaagatgtccttcaagaacccaaaactgaagatatagtagcagtgcagaaagcaaaagcattgtacaggtcttgtataaatgaatctgctattgatagcagaggtggagaacctctactcaaactgttaccagacatatatgggtggccagtagcaacagaaaactgggagcaaaaatatggtgcttcttggacagctgaaaaagctattgcacaactgaattctaaatatgggaaaaaagtccttattaatttgtttgttggcactgatgataagaattctgtgaatcatgtaattcatattgaccaacctcgacttggcctcccttctagagattactatgaatgcactggaatctataaagaggcttgtacagcatatgtggattttatgatttctgtggccagattgattcgtcaggaagaaagattgcccatcgatgaaaaccagcttgctttggaaatgaataaagttatggaattggaaaaagaaattgccaatgctacggctaaacctgaagatcgaaatgatccaatgcttctgtataacaagatgacattggcccagatccaaaataacttttcactagagatcaatgggaagccattcagctggttgaatttcacaaatgaaatcatgtcaactgtgaatattagtattacaaatgaggaagatgtggttgtttatgctccagaatatttaaccaaacttaagcccattcttaccaaatattctgccagagatcttcaaaatttaatgtcctggagattcataatggatcttgtaagcagcctcagccgaacctacaaggagtccagaaatgctttccgcaaggccctttatggtacaacctcagaaacagcaacttggagacgttgtgcaaactatgtcaatgggaatatggaaaatgctgtggggaggctttatgtggaagcagcatttgctggagagagtaaacatgtggtcgaggatttgattgcacagatccgagaagtttttattcagactttagatgacctcacttggatggatgccgagacaaaaaagagagctgaagaaaaggccttagcaattaaagaaaggatcggctatcctgatgacattgtttcaaatgataacaaactgaataatgagtacctcgagttgaactacaaagaagatgaatacttcgagaacataattcaaaatttgaaattcagccaaagtaaacaactgaagaagctccgagaaaaggtggacaaagatgagtggataagtggagcagctgtagtcaatgcattttactcttcaggaagaaatcagatagtcttcccagccggcattctgcagccccccttctttagtgcccagcagtccaactcattgaactatgggggcatcggcatggtcataggacacgaaatcacccatggcttcgatgacaatggcagaaactttaacaaagatggagacctcgttgactggtggactcaacagtctgcaagtaactttaaggagcaatcccagtgcatggtgtatcagtatggaaacttttcctgggacctggcaggtggacagcaccttaatggaattaatacactgggagaaaacattgctgataatggaggtcttggtcaagcatacagagcctatcagaattatattaaaaagaatggcgaagaaaaattacttcctggacttgacctaaatcacaaacaactatttttcttgaactttgcacaggtgtggtgtggaacctataggccagagtatgcggttaactccattaaaacagatgtgcacagtccaggcaatttcaggattattgggactttgcagaactctgcagagttttcagaagcctttcactgccgcaagaattcatacatgaatccagaaaagaagtgccgggtttggtgatcttcaaaagaagcattgcagcccttggctagacttgccaacaccacagaaatggggaattctctaatcgaaagaaaatgggccctaggggtcactgtactgacttgagggtgattaacagagagggcaccatcacaatacagataacattaggttgtcctagaaagggtgtggagggaggaagggggtctaaggtctatcaagtcaatcatttctcactgtgtacataatgcttaatttctaaagataatattactgtttatttctgtttctcatatggtctaccagtttgctgatgtccctagaaaacaatgcaaaacctttgaggtagaccaggatttctaatcaaaagggaaaagaagatgttgaagaatacagttaggcaccagaagaacagtaggtgacactatagtttaaaacacattgcctaactactagtttttacttttatttgcaacatttacagtccttcaaaatccttccaaagaattcttatacacattggggccttggagcttacatagttttaaactcatttttgccatacatcagttattcattctgtgatcatttattttaagcactcttaaagcaaaaaatgaatgtctaaaattgttttttgttgtacctgctttgactgatgctgagattcttcaggcttcctgcaattttctaagcaatttcttgctctatctctcaaaacttggtatttttcagagatttatataaatgtaaaaataataatttttatatttaattattaactacatttatgagtaactattattataggtaatcaatgaatattgaagtttcagcttaaaataaacagttgtgaaccaagatctataaagcgatatacagatgaaaatttgagactatttaaacttataaatcatattgatgaaaagatttaagcacaaactttagggtaaaaattgccattggacagttgtctagagatatatatacttgtggttttcaaattggactttcaaaattaaatctgtccctgagagtgtctctgataaaagggcaaatctgcacctatgtagctctgcatctcctgtcttttcaggtttgtcatcagatggaaatattttgataataaattgaaattgtgaactcattgctccctaagactgtgacaactgtctaactttagaagtgcatttctgaatagaaatgggaggcctctgatggaccttctagaattataagtcacaaagagttctggaaaagaactgtttactgcttgataggaattcatcttttgaggcttctgttcctctcttttcctgttgtattgactattttcgttcattacttgattaagattttacaaaagaggagcacttccaaaattcttatttttcctaacaaaagatgaaagcagggaatttctatctaaatgatgagtattagttccctgtctcttgaaaaatgcccatttgcctttaaaaaaaaaagttacagaaatactataacatatgtacataaattgcataaagcataagtatacagttcaataaacttaactttaactgaacaatggccctgtagccagcacctgtaagaaacagagcagtaccagcgctctaaaagcacctccttgtcactttattactcccagaacaacaactatcctgacttctaatatcattcactagctttgcctggttttgtcttttatgcagatagaatcaatcagtatgtattcttttgtgcctggcttctttctctcagccttacatttgtgagattcctctgtattgtgctgattgtggatcttttcattctcattgcagaataatgttctattgtgggacttattacaatttgttcatcctattgttgatgggcacttgagaactttccattttggcgctattacaaatagtgcaactatgaatgtactgcatgttaccatcttacttgagcctttaatggacttatttcttcaaatccttccaaaaattattataagcattgaaattatagtttcaagccaactgtggatacccttaccctttcctcctttatcacaaccaccgttacaagtatacttatatttccctaaaatacatttaaaacttacctaagtgacatttgtagttggagtaataggagcttccagctctaataaaacagctgtctctaacttattttatttccatcatgtcagagcaggtgaagagccagaagtgaagagtgactagtacaaattataaaaagccactagactcttcactgttagctttttaaaacattaggctcccatccctatggaggaacaactctccagtgcctggatcccctctgtctacaaatataagattttctgggcctaaaggatagatcaaagtcaaaaatagcaatgcctccctatccctcacacatccagacatcatgaattttacatggtactcttgttgagttctgtagagccttctgatgtctctaaagcactaccgattctttggagttgtcacatcagataagacatatctctaattccatccataaatccagttctactatggctgagttctggtcaaagaaagaaagtttagaagctgagacacaaagggttgggagctgatgaaactcacaaatgatggtaggaagaagctctcgacaatacccgttggcaaggagtctgcctccatgctgcagtgttcgagtggattgtaggtgcaagatggaaaggattgtaggtgcaagctgtccagagaaaagagtccttgttccagccctattctgccactcctgacagggtgaccttgggtatttgcaatattcctttgggcctctgcttctctcacctaaaaaaagagaattagattatattggtggttctcagcaagagaaggagtatgtgtccaatgctgccttcccatgaatctgtctcccagttatgaatcagtgggcaggataaactgaaaactcccatttacgtgtctgaatcgagtgagacaaaattttagtccaaataacaagtaccaaagttttatcaagtttgggtctgtgctgctgttactgttaaccatttaagtggggcaaaaccttgctaattttctcaaaagcatttatcattcttgttgccacagctggagctctcaaactaaaagacatttgttattttggaaagaagaaagactctattctcaaagtttcctaatcagaaatttttatcagtttccagtctcaaaaatacaaaataaaaacaaacgtttttaatactattgcttttatgcctagtcaactctg

SEQ ID NO: 3 - DNA, 4553 bp, Homo sapiens
acgcgtctgcggccagcccggactctttaaaagccggcggtgcgcggggcatcccagccaagccggagaggaggcgagcagcagggcctggtggcgagagcgcggctgtcactgcgcccgagcatcccagagctttccgagcggacgagccggccgtgccgggcatccccagcctcgctaccctcgcagcacacgtcgagccccgcacaggcgagggtccggaacttagcccaaagcacgtttcccctggcagcgcaggaaacgcccggccgcgcgccggcgcacgcccccctctcctcctttgttccgggggtcggcggccgctctcctgccagcgtcgggatctcggccccgggaggcgggccgtcgggcgcagccgcgaagatgccgttggaactgacgcagagccgagtgcagaagatctgggtgcccgtggaccacaggccctcgttgcccagatcctgtgggccaaagctgaccaactcccccaccgtcatcgtcatggtgggcctccccgcccggggcaagacctacatctccaagaagctgactcgctacctcaactggattggcgtccccacaaaagtgttcaacgtcggggagtatcgccgggaggctgtgaagcagtacagctcctacaacttcttccgccccgacaatgaggaagccatgaaagtccggaagcaatgtgccttagctgccttgagagatgtcaaaagctacctggcgaaagaagggggacaaattgcggttttcgatgccaccaatactactagagagaggagacacatgatccttcattttgccaaagaaaatgactttaaggcgtttttcatcgagtcggtgtgcgacgaccctacagttgtggcctccaatatcatggaagttaaaatctccagcccggattacaaagactgcaactcggcagaagccatggacgacttcatgaagaggatcagttgctatgaagccagctaccagcccctcgaccccgacaaatgcgacagggacttgtcgctgatcaaggtgattgacgtgggccggaggttcctggtgaaccgggtgcaggaccacatccagagccgcatcgtgtactacctgatgaacatccacgtgcagccgcgtaccatctacctgtgccggcacggcgagaacgagcacaacctccagggccgcatcgggggcgactcaggcctgtccagccggggcaagaagtttgccagtgctctgagcaagttcgtggaggagcagaacctgaaggacctgcgcgtgtggaccagccagctgaagagcaccatccagacggccgaggcgctgcggctgccctacgagcagtggaaggcgctcaatgagatcgacgcgggcgtctgtgaggagctgacctacgaggagatcagggacacctaccctgaggagtatgcgctgcgggagcaggacaagtactattaccgctaccccaccggggagtcctaccaggacctggtccagcgcttggagccagtgatcatggagctggagcggcaggagaatgtgctggtcatctgccaccaggccgtcctgcgctgcctgcttgcctacttcctggataagagtgcagaggagatgccctacctgaaatgccctcttcacaccgtcctgaaactgacgcctgtcgcttatggctgccgtgtggaatccatctacctgaacgtggagtccgtctgcacacaccgggagaggtcagaggatgcaaagaagggacctaacccgctcatgagacgcaatagtgtcaccccgctagccagccccgaacccaccaaaaagcctcgcatcaacagctttgaggagcatgtggcctccacctcggccgccctgcccagctgcctgcccccggaggtgcccacgcagctgcctggacaaaacatgaaaggctcccggagcagcgctgactcctccaggaaacactgaggcagacgtgtcggttccattccatttccatttctgcagcttagcttgtgtcctgccctccgcccgaggcaaaacgtatcctgaggacttcttccggagagggtggggtggagcagcgggggagccttggccgaagagaaccatgcttggcaccgtctgtgtcccctcggccgctggacaccagaaagccacgtgggtccctggcgccctgcctttagccgtggggcccccacctccactctctgggtttcctaggaatgtccagcctcggagaccttcacaaagccttgggagggtgatgagtgctggtcctgacaggaggccgctggggacactgtgctgttttgtttcgtttctgtgatctcccggcacgtttggagctgggaagaccacactggtggcagaatcctaaaattaaaggaggcaggctcctagttgctgaaagttaaggaatgtgtaaaacctccacgtgactgtttggtgcatcttgacctgggaagacgcctcatgggaacgaacttggacaggtgttgggttgaggcctcttctgcaggaagtccctgagctgagacgcaagttggctgggtggtccgcaccctggctctcctgcaggtccacacaccttccaggcctgtggcctgcctccaaagatgtgcaagggcaggctggctgcacggggagagggaagtattttgccgaaatatgagaactggggcctcctgctcccagggagctccagggcccctctctcctcccacctggacttggggggaactgagaaacactttcctggagctgctggcttttgcacttttttgatggcagaagtgtgacctgagagtcccaccttctcttcaggaacgtagatgttggggtgtcttgccctggggggcttggaacctctgaaggtggggagcggaacacctggcatccttccccagcacttgcattaccgtccctgctcttcccaggtggggacagtggcccaagcaaggcctcactcgcagccacttcttcaagagctgcctgcacactgtcttggagcatctgccttgtgcctggcactctgccggtgccttgggaaggtcggaagagtggactttgtcctggccttcccttcatggcgtctatgacacttttgtggtgatggaaagcatgggacctgtcgtctcagcctgttggtttctcctcattgcctcaaaccctggggtaggtgggacggggggtctcgtgcccagatgaaaccatttggaaactcggcagcagagtttgtccaaatgacccttttcaggatgtctcaaagcttgtgccaaaggtcacttttctttcctgccttctgctgtgagccctgagatcctcctcccagctcaagggacaggtcctgggtgagggtgggagatttagacacctgaaactgggcgtggagagaagagccgttgctgtttgttttttgggaagagcttttaaagaatgcatgtttttttcctggttggaattgagtaggaactgaggctgtgcttcaggtatggtacaatcaagtgggggattttcatgctgaaccattcaagccctccccgcccgttgcacccactttggctggcgtctgctggagaggatgtctctgtccgcattcccgtgcagctccaggctcgcgcagttttctctctctccctggatgttgagtctcatcagaatatgtgggtagggggtggacgtgcacgggtgcatgattgtgcttaacttggttgtatttttcgatttgacatggaaggcctgttgctttgctcttgagaatagtttctcgtgtccccctcgcaggcctcattctttgaacatcgactctgaagtttgatacagataggggcttgatagctgtggtcccctctcccctctgactacctaaaatcaatacctaaatacagaagccttggtctaacacgggacttttagtttgcgaagggcctagatagggagagaggtaacatgaatctggacagggagggagatactatagaaaggagaacactgcctactttgcaagccagtgacctgccttttgaggggacattggacgggggccgggggcgggggttgggtttgagctacagtcatgaacttttggcgtctactgattcctccaactctccaccccacaaaataacggggaccaatatttttaactttgcctatttgtttttgggtgagtttcccccctccttattctgtcctgagaccacgggcaaagctcttcattttgagagagaagaaaaactgtttggaaccacaccaatgatatttttctttgtaatacttgaaatttatttttttattattttgatagcagatgtgctatttatttatttaatatgtataaggagcctaaacaatagaaagctgtagagattgggtttcattgttaattggtttgggagcctcctatgtgtgacttatgacttctctgtgttctgtgtatttgtctgaattaatgacctgggatataaagctatgctagctttcaaacaggagatgcctttcagaaatttgtatattttgcagttgccagaccaataaaatacctggttgaaatacatggacgaagtaaaaaa

SEQ ID NO: 4 - DNA, 3308 bp, Homo sapiens
tcccggtagccgcagctgtcttttccggcccccgtgcactctccgcccgagcggagccccccggctcgcggggatcgcccccgagcgctgcgtcctgcgggtcacctaacccatttgtggcttcctctacctgtgctcagccatggccagcgagagctcacctctgctggcctaccggctcctgggggaggagggggttgccctccctgccaatggggccgggggtcctggaggggcgtctgcccggaagctgtccaccttcctgggtgtggtggtgcccactgtcctgtccatgttcagcatagttgtttttctgaggattgggttcgtggtgggtcatgctgggctactgcaggccctggccatgctgctggttgcctacttcatcctggcactcaccgtcctctctgtctgtgccatcgccaccaatggagccgtgcaggggggcggagcctacttcatgatcagccgcacactggggcccgaggtcgggggcagcattgggctcatgttctacctggctaacgtctgtggctgtgccgtctccctcctggggctggtggagtctgtgcttgatgtcttcggggccgatgccacagggcccagtgggctccgggtcctgccccagggctacggctggaacctgctgtatggctccctgctgctgggccttgtgggtggggtctgcaccctgggagccggcctctatgcccgggcctcattcctcacattcctgctggtctctggctccctggcctctgtgctcatcagttttgtggctgtggggccgagggacatccgcttgactcctaggcctggccccaatggctcctccctgccgccccggtttggccacttcaccggcttcaacagcagtaccctgaaggacaacttgggcgctggctatgctgaggactacaccacgggagccgtgatgaattttgccagcgtctttgctgtcctctttaacggctgtacaggcatcatggctggggccaacatgtcaggggagctgaaggaccccagccgggcgatccctctgggcacgatcgtcgccgtcgcctacaccttcttcgtctatgtcctgcttttctttctctccagcttcacttgtgacaggaccctgctgcaggaagactatgggttcttccgcgccatcagcctgtggcccccactggtgttgatcggaatctatgccacagcgctctcagcgtccatgagctcgctcattggtgcctcccgcatcctccatgccctggcccgggatgacctctttggcgtgatcttggcaccggccaaggttgtgtcccgagggggaaacccctgggcagctgtactttattcttggggcctggtgcagctggtgctcctggctgggaagctgaacacactggctgctgtggtcactgtcttctacctggtggcctatgctgccgtggacctgtcctgcctgagcctggagtgggcctcggcccccaacttccgccccaccttcagcctgttctcctggcacacctgcctgctgggggtggcctcctgcctgctcatgatgttcctcatcagtcctggcgcggctggtggctccctgctcctcatgggtctgctggctgccctgctcaccgcgcgaggaggccccagtagctggggctatgtcagccaggccttgcttttccaccaggtgcgtaagtatctgcttcggctggacgtccggaaggatcacgtgaagttctggcggccccagctgctgctcctggtggggaacccccggggcgccctgcctctgctgcggttggccaaccagcttaagaagggggggctgtatgtgctgggccacgtcaccctgggagacctcgactccctgccctcggaccctgtacagccgcagtatggggcatggctcagcctggtggaccgtgcccaggtgaaggcttttgtggatctaaccctctcaccctccgtgcgccagggggctcagcatctgctgcgaatctccggcctcggtggcatgaagcccaacacgttggtcctaggtttctacgatgacgctccaccgcaggaccatttcctgacggacccggctttctctgagcctgcagacagcaccagggagggcagttccccagctctgagcaccctgttccctcctccccgggctcctgggagcccccgggccctcaatccccaggactatgtggccacggtggccgacgccctcaagatgaacaagaatgtggtgctggcccgggccagcggggccttgccccctgagcggctgagccgggggtctgggggcacctctcagctgcaccatgtggacgtgtggcccctcaacctgctgcggccccggggtgggcccggctatgtggatgtctgcggcctcttcctgctgcagatggcaaccatcttgggcatggtgcccgcttggcatagcgcccggctccggatcttcctgtgcctggggcctcgggaggcgcctggggcggccgaggggcggctgcgggcactgctgagccaactgaggatccgggctgaggtgcaggaggtggtgtggggcgagggggccggggctggggaacccgaggcggaggaggaaggggactttgtgaacagtgggcggggagacgcagaggcagaggccctggcacgcagcgccaacgccctggttcgggcccagcaggggcgcggcacaggaggagggccgggtgggccggagggtggggatgctgagggccccatcacagccctcaccttcctgtacttgcctcggccgccagccgatcccgcccgatacccccgctacctggcgctactggagactctaacccgagacctgggccccacgctgctggttcatggggtcactccagtcacctgcactgatctgtgatgcccctgcctccagggctaggtagagagggcccaggcaggcggcctatcctgatccttggaggaggaggaagaggaggccactgtggcccgtggccctgcccttgggacgtggagcccaggggaggtttgaaggggatcctgggcttgggcatcacgcccacctcctttggcagagggaccccagcacactaactctgggtggctgtccccaccgtgcaggggagggagtccgcagcctcccttcactggtgccttgatgctaggggccaggcctcctctgtgactctgggctacctcagtttccccattttggccagactcaccggcccactggggtggtgatgttttcgttctgttttatttttctaactctgctgaccatgaataaaagaccaaaacactacaaaaaaaaaaaaaag

SEQ ID NO: 5 - DNA, 2775 bp, Homo sapiens
ggactgccccgccctggtccagtgattgatcagcagtgattactgaggctttaatggtccgcttggatgggaattaattctgggatggataaataatgcatcgaggtttatgtagtccaaggcgagccgtccgtccggagccaggagaggtagccgagggagcctgacgggtgacgccagcggccacggggccccgaacgagcaggacatgaggggcgactaggcgcgaggacgagcaaaagcaagtggatgacagcatgaacggccctgcggggctggccggacggctgcaagaacatgctgagcccaaagatcaggcaggccaggagggcccgctccaaaagcctagtgatgggggagcagagccggagccctgggcggatgccgtgccctcacaggctgggccccgtgctgaaggcgggctggctgaagaagcagaggagcatcatgaagaactggcagcagcgctggtttgtgctgcgtggggatcagcttttctactacaaggacaaagatgagatcaagccccagggatttatttctctacaagggacacaggtgactgaacttcctcctggccccgaggacccagggaagcacctctttgagatcagcccaggtggtgccggggagcgggagaaggtgccggccaaccccgaggcgctcctgctcatggccagctcccagcgtgacatggaggactgggtgcaggccatccgccgagtcatctgggccccgctgggcggagggatctttgggcagcgcctagaggaaacagtccaccacgagcggaagtatggcccccgcctggcgcccctgctggtggagcagtgtgtggacttcatccgggagcgcgggctcactgaggaggggctgttccgcatgccaggccaggccaacctggtgagggacctgcaggattccttcgactgtggggagaagccactgtttgacagcacaacagacgtgcacacggtggcctccctgctgaagctgtacctgcgggagctccccgagcccgtggtccccttcgccaggtacgaggacttcctcagctgcgcccagctgctcaccaaggacgagggggagggcactctggagttggctaaacaagtgagcaaccttcctcaggcaaattacaacctgctcagatacatctgcaagtttctggatgaagttcaggcatactcaaatgtcaacaagatgagtgtccagaatctggcaaccgtttttggacctaacattctgcggccacaggtagaggacccagtaaccatcatggaaggcacttccctcgtccagcacctgatgaccgtcctcatccgcaaacacagccagctcttcacggcaccggtcccggaagggcccacctccccgcgcgggggcctgcaatgcgcagtggggtggggctccgaggaggtcaccagggacagccaaggagagcccggcggccccggcctgcccgcgcacaggacctcttccctggacggggcggccgtggcggtgctctccagaacagcccccacggggccggggagccggtgcagccctgggaagaaggtgcagaccctgcccagttggaagtcctccttccggcagccgaggtccctatcgggaagcccgaaggggggcggctcatccctggaggtgcccatcatctcctccggcgggaactggcttatgaacgggctgtcctccctgcgcggacaccgccgggcctcgtcgggagaccggctcaaggactcgggctccgtgcagagactctccacctacgacaatgtgcccgcgccgggcctggtccccggcatacccagcgtggccagtatggcgtggtccggggcctcgtccagcgagtcgtcggtggggggctcactcagcagctgcacggcctgccgcgccagcgactcgtctgcccgcagttccctgcacaccgactgggccctggagccctccccgctccccagcagcagcgaggaccccaagtccctggacctggaccacagcatggacgaggcgggcgcgggtgccagcaacagcgagcccagcgagccggacagccccacccgggaacacgcgcgccgctccgaggccttacaggggctggtcactgagctcagggccgagctgtgccgccagcggactgagtacgagaggagtgtgaaaagaatcgaagaagggagtgctgacctgagaaaacgaatgtcccggttagaagaagaactggaccaggaaaagaaaaaatacatcatgctggaaataaagctgcggaactctgaacgggcgcgggaggatgcggagaggaggaaccagctgttgcagagggaaatggaggagtttttttcgaccctaggaagcttgactgttggggcaaaaggtgccagggccccaaagtaaaaggaatggcagagctcacttctgtaccacgtctgctggtctccagccttgtatggagttagaagcgtctgtatctctggagcagccaggcgctctggagccagctggagagagagagatcctgatacctctgtggggactgtggggacttttgggaccccacacactccaggtgggatcagatgctgctccaaccatgcagttcctggtgagggtcagaaggggacggtaccaagagtagcgcttagcccttacccaggaaatatccttcatggccacagaaatggagggcgcccaggatccaggcagccaccgggaacagtcagctttctttattaaatgtgctcacaaagcaaaaaaaaaaaaaaaaaaaaaaaaaaa

SEQ ID NO: 6 - DNA, 4091 bp, Homo sapiens
ggcgtctccggctgctcctattgagctgtctgctcgctgtgcccgctgtgcctgctgtgcccgcgctgtcgccgctgctaccgcgtctgctggacgcgggagacgccagcgagctggtgattggagccctgcggagagctcaagcgcccagctctgccccaggagcccaggctgccccgtgagtcccatagttgctgcaggagtggagccatgagctgcgtcctgggtggtgtcatccccttggggctgctgttcctggtctgcggatcccaaggctacctcctgcccaacgtcactctcttagaggagctgctcagcaaataccagcacaacgagtctcactcccgggtccgcagagccatccccagggaggacaaggaggagatcctcatgctgcacaacaagcttcggggccaggtgcagcctcaggcctccaacatggagtacatgacctgggatgacgaactggagaagtctgctgcagcgtgggccagtcagtgcatctgggagcacgggcccaccggtctgctggtgtccatcgggcagaacctgggcgctcactggggcaggtatcgctctccggggttccatgtgcagtcctggtatgacgaggtgaaggactacacctacccctacccgagcgagtgcaacccctggtgtccagagaggtgctcggggcccatgtgcacgcactacacacagatagtttgggccaccaccaacaagatcggttgtgctgtgaacacctgccggaagatgactgtctggggagaagtttgggagaacgcggtctactttgtctgcaattattctccaaaggggaactggattggagaagccccctacaagaatggccggccctgctctgagtgcccacccagctatggaggcagctgcaggaacaacttgtgttaccgagaagaaacctacactccaaaacctgaaacggacgagatgaatgaggtggaaacggctcccattcctgaagaaaaccatgtttggctccaaccgagggtgatgagacccaccaagcccaagaaaacctctgcggtcaactacatgacccaagtcgtcagatgtgacaccaagatgaaggacaggtgcaaagggtccacgtgtaacaggtaccagtgcccagcaggctgcctgaaccacaaggcgaagatctttggaactctgttctatgaaagctcgtctagcatatgccgcgccgccatccactacgggatcctggatgacaagggaggcctggtggatatcaccaggaacgggaaggtccccttcttcgtgaagtctgagagacacggcgtgcagtccctcagcaaatacaaaccttccagctcattcatggtgtcaaaagtgaaagtgcaggatttggactgctacacgaccgttgctcagctgtgcccgtttgaaaagccagcaactcactgcccaagaatccattgtccggcacactgcaaagacgaaccttcctactgggctccggtgtttggaaccaacatctatgcagatacctcaagcatctgcaagacagctgtgcacgcgggagtcatcagcaacgagagtgggggtgacgtggacgtgatgcccgtggataaaaagaagacctacgtgggctcgctcaggaatggagttcagtctgaaagcctggggactcctcgggatggaaaggccttccggatctttgctgtcaggcagtgaatttccagcaccaggggagaaggggcgtcttcaggagggcttcggggttttgcttttatttttattttgtcattgcggggtatatggagagtcaggaaacttcctttgactgatgttcagtgtccatcactttgtggcctgtgggtgaggtgacatctcatcccctcactgaagcaacagcatcccaaggtgctcagccggactccctggtgcctgatcctgctggggcccgggggtctccatctggacgtcctctctcctttagagatctgagctgtctcttaaaggggacagttgcccaaaatgttccttgctatgtgttcttctgttggtggaggaagttgatttcaacctccctgccaaaagaacaaaccatttgaagctcacaattgtgaagcattcacggcgtcggaagaggccttttgagcaagcgccaatgagtttcaggaatgaagtagaaggtagttatttaaaaataaaaaacacagtccgtccctaccaatagaggaaaatggttttaatgtttgctggtcagacagacaaatgggctagagtaagagggctgcgggtatgagagaccccggctccgccctggcacgtgtccttgctggcggcccgccacaggcccccttcaatggccgcattcaggatggctctatacacagcagtgctggtttatgtagagttcagcagtcacttcagagatgtatcttgtctttgtcaggcccttcatcttcatggcccacctgttttctgccgtgacctttggtcccattgaggactaaggatcgggaccctttctttaccccctacccattgtggctcccaccctgcctcggactggtttacgtgtcctggttcacacccaggacttttctttgcaagcgaacctgtttgaagcccaagtcttaactcctggtctcgtaaggttccactgagacgagatgtctgagaacaaccaaagaaggcctgctctttgctgcttttaaaaaatgacaattaaatgtgcagattccccacgcacccgatgacctattttttcagccgtgggaggaatggagtctttggtacattcctcaccgaggttagcagctcagtttgtggttatgaaaccgtctgtggcctcatgacagcgagagatgggaatacactagaaggatctcttttcctgttttcgtgaaacgactcttgccaaacgttcccgaggcgccaaggagtgtagtacaccctggctgccatcactctataaaagtgcttcatgagcccagaccaaaagcccacagtgaaatgaagtacccttttgtaaatagcatttttttgcagaaggtgaaaattccactctctaccaccgggccagccaatagatcactttggtgaatgctagtttcaaatttgattcaaaatatttcttaggtgaaagaactagcagaaagtcaaaaactaagatactgtagactggacaagaaattctacctgggcacctaggtgatgccttctttctttgattgcctttctaataaatgcagaatctgaaggtaaataggtttaaaacaaaacaaaaacccacccctttaaggagttggtaaaaagcagttcaactcttagcttgactgagctaaaattcacaggactacgtgctttgtgcattgtagtctagtcgtaattcataggtactgactcctcagccccaaatgtcggagaggaagaattcggtcagcctgtcaggtcgtgagtccagttaccaccaaacatctgggaaacttctgggtgctgggtgctctgctgctggacttttgtggctgtgtctgtgtctgcaagataaattagatcgccctgtggggtttgcagaattagtgaagggtccaggacgatcccagtgggctcgcttccaaagcatcccactcaagggagacttgaaacttccagtgtgagttgaccccatcatttaaaaataaagtccccgggttccttaatgcctccttcactgggccttcctagcaggatagaaagtccttgcccagagcaggacctggctgtctttttttttttttttttcccgagaccaagtttcactctgttgcccaaggtagagtgcagtggcgtgatctctgctcattgcaactgccgcctcccgggttcaagcaattctcatgcatcagcctcccattgccctaccgtattccaaagcgtgtgctggtttctcatattgtctgtaggctcactcagcccgcagtttatgtgtgtgcttttttctatgaaaaatgatgtattttgctacttcctgtgtacaaagttttattgtaaatgttttttgtgctttgcatgaacaggggccacgttgttgcaattgtttcagtagaactggtttgatttctaaaatgttcctg

SEQ ID NO: 7 - DNA, 1310 bp, Homo sapiens
aaattgagcccgcagcctcccgcttcgctctctgctcctcctgttcgacagtcagccgcatcttcttttgcgtcgccagccgagccacatcgctcagacaccatggggaaggtgaaggtcggagtcaacggatttggtcgtattgggcgcctggtcaccagggctgcttttaactctggtaaagtggatattgttgccatcaatgaccccttcattgacctcaactacatggtttacatgttccaatatgattccacccatggcaaattccatggcaccgtcaaggctgagaacgggaagcttgtcatcaatggaaatcccatcaccatcttccaggagcgagatccctccaaaatcaagtggggcgatgctggcgctgagtacgtcgtggagtccactggcgtcttcaccaccatggagaaggctggggctcatttgcaggggggagccaaaagggtcatcatctctgccccctctgctgatgcccccatgttcgtcatgggtgtgaaccatgagaagtatgacaacagcctcaagatcatcagcaatgcctcctgcaccaccaactgcttagcacccctggccaaggtcatccatgacaactttggtatcgtggaaggactcatgaccacagtccatgccatcactgccacccagaagactgtggatggcccctccgggaaactgtggcgtgatggccgcggggctctccagaacatcatccctgcctctactggcgctgccaaggctgtgggcaaggtcatccctgagctgaacgggaagctcactggcatggccttccgtgtccccactgccaacgtgtcagtggtggacctgacctgccgtctagaaaaacctgccaaatatgatgacatcaagaaggtggtgaagcaggcgtcggagggccccctcaagggcatcctgggctacactgagcaccaggtggtctcctctgacttcaacagcgacacccactcctccacctttgacgctggggctggcattgccctcaacgaccactttgtcaagctcatttcctggtatgacaacgaatttggctacagcaacagggtggtggacctcatggcccacatggcctccaaggagtaagacccctggaccaccagccccagcaagagcacaagaggaagagagagaccctcactgctggggagtccctgccacactcagtcccccaccacactgaatctcccctcctcacagttgccatgtagaccccttgaagaggggaggggcctagggagccgcaccttgtcatgtaccatcaataaagtaccctgtgctcaacc

SEQ ID NO: 8 - DNA, 974 bp, Homo sapiens
cctgacatggagcctgccagctccgtcagccctgactcggcccggagctgagctccccacctgccggtagcccaggagatggagcagcccagcccacgtgcccggccttccgcccctgacttcacttgataacaaactagaaactgaaacagggtcgggatgccgatgccggcttggagttagagatgagtcaccgctgagagcagctgcagtagctgagcagtggcagcagagaggcagacgtgagctgagggcgcagaggcaggcagcatctctgagggtccccaaggagcatggctgggagccgtgaggtggtggccatggactgcgagatggtggggctggggccccaccgggagagtggcctggctcgttgcagcctcgtgaacgtccacggtgctgtgctgtacgacaagttcatccggcctgagggagagatcaccgattacagaacccgggtcagcggggtcacccctcagcacatggtgggggccacaccatttgccgtggccaggctagagatcctgcagctcctgaaaggcaagctggtggtgggtcatgacctgaagcacgacttccaggcactgaaagaggacatgagcggctacacaatctacgacacgtccactgacaggctgttgtggcgtgaggccaagctggaccactgcaggcgtgtctccctgcgggtgctgagtgagcgcctcctgcacaagagcatccagaacagcctgcttggacacagctcggtggaagatgcgagggcaacgatggagctctatcaaatctcccagagaatccgagcccgccgagggctgccccgcctggctgtgtcagactgaagccccatccagcccgttccgcagggactagaggctttcggctttttgggacagcaactaccttgcttttggaaaatacatttttaatagtaaagtggctctatattttctctacgcaaaaaaaaaaaaaaaaaa

SEQ ID NO: 9 - DNA, 2631 bp, Homo sapiens
cgtccctctttctccaccccgccgagcctaaactagtgacggggagggagacgggatagtgtttctgtttcgtggtctttgaatccacaacctctagtctgaacacagagaacacaaatttgtctattacttcaggaagcccagggggaaccgcgccccgctgaagggctcggggaaggcgcgctcccgcgtcccgccccctcctcccccagcactcacactgtggtagcggcggagggcggagggatccggaggcggcggagggagacgtcattgcagggttgtttgtcagtctcggcggcggcggcggcggcggcggcggcggcgatccacagtgattcggccgccgcgccggggggtgggggggctgcgcgggactttttttttttcagactgaccgcggggcagctgcggagcatgtcgaccccggcccggaggaggctcatgcgggatttcaagcggttacaagaggacccacctgtgggtgtcagtggcgcaccatctgaaaacaacatcatgcagtggaatgcagttatatttggaccagaagggacaccttttgaagatggtacttttaaactagtaatagaattttctgaagaatatccaaataaaccaccaactgttaggtttttatccaaaatgtttcatccaaatgtgtatgctgatggtagcatatgtttagatatccttcagaatcgatggagtccaacatatgatgtatcttctatcttaacatcaattcagtctctgctggatgaaccgaatcctaacagtccagccaatagccaggcagcacagctttatcaggaaaacaaacgagaatatgagaaaagagtttcggccattgttgaacaaagctggaatgattcataatagacaactggtctgttaatctttttcatcattgttgtgtataatttacctctcattagaaaggctaacaaattttaagtgccacaggttttaaggattctgcagaaaaaaaagaaaaaagtccttcagtttagaacctacaaaagcttgtgtatcttgattaatgtactttttattgcatggtgtgaactaagttattgctgcataaatttgtaatatatcctgtttgtatttttttccaagtgtataatgttggtgtggagttttcatgacagaatatacacattttgtaaatctgtacttttttcaaatattgaatgccttatttttgaattctttagatttttaaattggagaaaagcacttaaagttttttatatatgaatattacatgtaaagctgttaaaatacataacttcagtgcaagagactttgtcacttatttccttatgtgtgtaggaggggttaataagtctctagctctccatctattgatagtttcatttacaatttcaaaagaacattcttatattttatcaaggaagtcttcaaatttgattctaaatagcgattataatctccaactttattttgaatgtacctctattagtttcaattgagtaattctagacataactggtttgactctgtccaactctgtatttaggccatttgttacagtttcttcatgcattacttactgttaaaactgtaccttttgcgatttcacagttggcacttctgccatgagcagagaactgatgcgacttgttttgctgcttggtagcactttaaaaaattttttgattaatgaagaaagtaaaaccataaacatttgccaaaaattcatgccccagtattagcaatgaattagttgcattggtttgagaaaggcacatattggagggaaatcttggtgtaacttaaatatttgaaaattacctttaatgcaatgcatatctgtttattctgggaaatgttttaatgccagggcctgctgagttgcttcttcttgtggagattttttttttaatctcctgagttgtataaaagttgtactgcatcttagtttactggataaatttaaaacacagtattgtagaaagctaatacaaaactatcctatgccttcaaatagtatagaaaatggaaaatatacaagtaaattctgttgaaccacctgtgtagtctctctagtagttaaaacagctattttagtaaccccaagagtttcttctcatatccataaaattggattacagtatggcaatatctacagcttctattcattatgcaacgtttaacattgattggataaatgcttataggctgggccaggtggctcccacctgtagtcccagcactttgggaggcaaaggcgggaggatcacttgaggccaggactttgagaccagccagggcaacataataagacttttctctactttaaattttttaaaaaattagttgggcatagtggcacttgcctgtagtctcagctacttaggaggctgaggtggcagaatagcttatgcctaggaggttgaggctgcagtgagctgtgattatgccattgcactccagcctgggtgacagagcaataccctgtctttaaaaataaaagctattacttggcaaattctgaggtaagtgtatgatcttagggaactttgatacaaatgggaattcactcactggaatcgtggctcccaaaaagatgctttaattgtgtggtgcttttatagtttagctcca

SEQ ID NO: 10 - DNA, 1764 bp, Homo sapiens
ctgctatagtacgcgggtggctggacctacatgcttcctgctgtggctgtctcggaacccgtggtcctccgcttcatgattttctgccgtctcttggcaaaaatggcaaataatgatgctgttctgaagagactggagcagaagggtgcagaggcagatcaaatcattgaatatcttaagcagcaagtttctctacttaaggagaaagcaattttgcaggcaactttgagggaagagaagaaacttcgagttgaaaatgctaaactgaagaaagaaattgaagaactgaaacaagagctaattcaggcagaaattcaaaatggagtgaagcaaataccatttccatctggtactccactgcacgctaattctatggtttctgaaaatgtgatacagtctacagcagtaacaaccgtatcttctggtaccaaagaacagataaaaggaggaacaggagacgaaaagaaagcgaaagagaaaattgaaaagaaaggagagaagaaggagaaaaaacagcaatcaatagctggaagtgccgactctaagccaatagatgtttcccgtctggatcttcgaattggttgcatcataactgctagaaaacaccctgatgcagattctttgtatgtggaagaagtagatgtcggagaaatagccccaaggacagttgtcagtggcctggtgaatcatgttcctcttgaacagatgcaaaatcggatggtgattttactttgtaacctgaaacctgcaaagatgaggggagtattatctcaagcaatggtcatgtgtgctagttcaccagagaaaattgaaatcttggctcctccaaatgggtctgttcctggagacagaattacttttgatgctttcccaggagagcctgacaaggagctgaatcctaagaagaagatttgggagcagatccagcctgatcttcacactaatgatgagtgtgtggctacatacaaaggagttccctttgaggtgaaagggaagggagtatgtagggctcaaaccatgagcaacagtggaatcaaataaaatgcttccactaccaaaagacattagagaaaaccttaaaagtaataaagagaaatatatttgtcacttatacctaaaatatgagtggctcatttttgcattactctcttctagacttgactagtcatttacttggtatatattgttttcattgattggggaaacactagatttttacctcggtttttgatcatttataatggagagaggaagttgcctatgttttgtaataatttattttttagcaggaatattgattagcagcttttttttctttatacacatagataactaactagattaatgtttagtttcttatttgtaggcacaggatgcatgaaatttcaagctctgggattttttgtatattgtgtatctgtatcaaaaatatcctctccttttcaaaaatgacaggttggaaaatgtttgtcagacttattaactggtcatattataataatactgataatgaccaactgctcattctgaaagccaaacataaaagctaggagaagtggcatctgaacatttttgctttgctgccagagtaaccctgactaataatacaataacagcaatttttttaaaaaactgagatttcctactggcttgaagtttttctatttagcaaaataattagtaataagttttgactaggtctaaagaatgaacacattgtaaacagttgccacagtagtttctaataaattgatcataaaagca

SEQ ID NO: 11 - DNA, 740 bp, Homo sapiens
gcctcacagaattgagagtttgttcttacacacaagtttaatgccaccttcctctgtctgccatggaccaacaagcaatatatgctgagttaaacttacccacagactcaggcccagaaagttcttcaccttcatctcttcctcgggatgtctgtcagggttcaccttggcatcaatttgccctgaaacttagctgtgctgggattattctccttgtcttggttgttactgggttgagtgtttcagtgacatccttaatacagaaatcatcaatagaaaaatgcagtgtggacattcaacagagcaggaataaaacaacagagagaccgggtctcttaaactgcccaatatattggcagcaactccgagagaaatgcttgttattttctcacactgtcaacccttggaataacagtctagctgattgttccaccaaagaatccagcctgctgcttattcgagataaggatgaattgatacacacacagaacctgatacgtgacaaagcaattctgttttggattggattaaatttttcattatcagaaaagaactggaagtggataaacggctcttttttaaattctaatgacttagaaattagaggtgatgctaaagaaaacagctgtatttccatctcacagacatctgtgtattctgagtactgtagtacagaaatcagatggatctgccaaaaagaactaacacctgtgagaaataaagtgtatcctgactcttga

SEQ ID NO: 12 - DNA, 2688 bp, Homo sapiens
gcggaggcaaggcgggtgcagggcttctggggacggagggaggtgccagaagttgagccctgaggccctgctggcccctgggcgcaggcccagctcaggcccccagggatggacgtcgtggaccctgacattttcaatagagacccccgggaccactatgacctgctacagcggctgggtggcggcacgtatggggaagtctttaaggctcgagacaaggtgtcaggggacctggtggcactgaagatggtgaagatggagcctgatgatgatgtctccacccttcagaaggaaatcctcatattgaaaacttgccggcacgccaacatcgtggcctaccatgggagttatctctggttgcagaaactctggatctgcatggaattctgtggggctggttctctccaggacatctaccaagtgacaggctccctgtcagagctccagattagctatgtctgccgggaagtgctccagggactggcctatttgcactcacagaagaagatacacagggacatcaagggagctaacatcctcatcaatgatgctggggaggtcagattggctgactttggcatctcggcccagattggggctacactggccagacgcctctctttcattgggacaccctactggatggctccggaagtggcagctgtggccctgaagggaggatacaatgagctgtgtgacatctggtccctgggcatcacggccatcgaactggccgagctacagccaccgctctttgatgtgcaccctctcagagttctcttcctcatgaccaagagtggctaccagcctccccgactgaaggaaaaaggcaaatggtcggctgccttccacaacttcatcaaagtcactctgactaagagtcccaagaaacgacccagcgccaccaagatgctcagtcatcaactggtatcccagcctgggctgaatcgaggcctgatcctggatcttcttgacaaactgaagaatcccgggaaaggaccctccattggggacattgaggatgaggagcccgagctaccccctgctatccctcggcggatcagatccacccaccgctccagctctctggggatcccagatgcagactgctgtcggcggcacatggagttcaggaagctccgaggaatggagaccagacccccagccaacaccgctcgcctacagcctcctcgagacctcaggagcagcagccccaggaagcaactgtcagagtcgtctgacgatgactatgacgacgtggacatccccacccctgcagaggacacacctcctccacttccccccaagcccaagttccgttctccatcagacgagggtcctgggagcatgggggatgatgggcagctgagcccgggggtgctggtccggtgtgccagtgggcccccaccaaacagcccccgtcctgggcctcccccatccaccagcagcccccacctcaccgcccattcagaaccctcactctggaacccaccctcccgggagcttgacaagcccccacttctgccccccaagaaggaaaagatgaagagaaagggatgtgcccttctcgtaaagttgttcaatggctgccccctccggatccacagcacggccgcctggacacatccctccaccaaggaccagcacctgctcctgggggcagaggaaggcatcttcatcctgaaccggaatgaccaggaggccacgctggaaatgctctttcctagccggactacgtgggtgtactccatcaacaacgttctcatgtctctctcaggaaagaccccccacctgtattctcatagcatccttggcctgctggaacggaaagagaccagagcaggaaaccccatcgctcacattagcccccaccgcctactggcaaggaagaacatggtttccaccaagatccaggacaccaaaggctgccgggcgtgctgtgtggcggagggtgcgagctctgggggcccgttcctgtgcggtgcattggagacgtccgttgtcctgcttcagtggtaccagcccatgaacaaattcctgcttgtccggcaggtgctgttcccactgccgacgcctctgtccgtgttcgcgctgctgaccgggccaggctctgagctgcccgctgtgtgcatcggcgtgagccccgggcggccggggaagtcggtgctcttccacacggtgcgctttggcgcgctctcttgctggctgggcgagatgagcaccgagcacaggggacccgtgcaggtgacccaggtagaggaagatatggtgatggtgttgatggatggctctgtgaagctggtgaccccggaggggtccccagtccggggacttcgcacacctgagatccccatgaccgaagcggtggaggccgtggctatggttggaggtcagcttcaggccttctggaagcatggagtgcaggtgtgggctctaggctcggatcagctgctacaggagctgagagaccctaccctcactttccgtctgcttggctcccccaggcctgtagtggtggagacacgcccagtggatgatcctactgctcccagcaacctctacatccaggaatgagtccctaggggggtgtcaggaactagtccttgcaccccctcccccatagacacactagtggtcatggcatgtcctcatctcccaataaacatgactttagcctctgcaaaaaaa

SEQ ID NO: 13 - DNA, 2822 bp, Homo sapiens
ggaaatgagaatggcgccgctggagatcctttcctgcttttggtttccctggcaggggttgaactgtggagtgtgtgggctcttatcacgcgatggcatccactgtggaaggaggcgacacagctctgctcccagaattccccagggggcccctcgatgcctaccgagcaagagcgtccttcagctggaaggagctggcgctgttcacggaaggggagggcatgctccgctttaagaaaaccatcttctcagctcttgagaatgaccctcttttcgctcgttcccctggagccgatctgtccttggagaagtatcgcgagctgaacttccttcgatgcaagcggatcttcgagtatgacttcctcagtgtcgaagacatgttcaagagccctctgaaggtccccgccttgattcagtgcctgggcatgtatgactcttctctggctgccaagtacctcctccatagcttggtttttggatcagcagtttacagttctggttctgaaagacatctcacatatattcaaaagatcttcaggatggagatttttggatgttttgctctgaccgaattaagccacggcagtaataccaaggccattcgcacaactgcccactacgatcctgccactgaggaattcatcatacattcccctgatttcgaagctgccaagttttgggttggcaacatgggcaagacagccactcacgcggtggtgtttgctaagctgtgtgtgccaggggaccagtgccatgggctgcatccctttatcgtgcagatccgggacccgaagacccttcttcccatgcctggagtgatggttggcgacataggaaaaaaactcgggcagaacggtctggataatggtttcgccatgttccacaaggtcagagttcctcgccagagccttctgaaccggatgggagacgtcacccccgagggcacctatgtcagcccctttaaggacgtcaggcagcgctttggagcgtccctggggagcctgtcctcgggccgggtctccatcgtgagcctggccatccttaacctaaagctggccgtggccatcgctcttcgcttctcagccactcggcgtcagtttggacccacagaggaggaggaaataccagtgcttgagtatccaatgcagcaatggcgcttgcttccatatctggcagctgtctacgccttagaccatttctccaagtcgctcttcctggacctggtggagctccagcgaggacttgcatcgggagaccgcagcgccagacaggcagagcttggacgtgagatccacgccctggcatcggccagcaagcccctggcctcgtggaccacccagcaaggaattcaggaatgccgggaggcgtgtggaggacacggctatctggccatgaaccggttgggtgtccttagagatgacaacgatcccaactgcacatacgaaggtgacaacaacatcctgctgcagcagacaagcaactatttgctgggtctcctggcacaccaggtccacgatggagcttgcttccgcagtccgctgaagtcagtggactttctggacgcctatcccggcatccttgaccagaagtttgaggtctccagtgttgccgactgcttggactctgcagtcgccctggcagcatacaagtggctggtttgctacctgctccgagagacttatcaaaaattaaaccaagagaaaagatcaggaagcagtgactttgaagcaaggaacaaatgccaggtgtcccacggccgtccgttggcgctggccttcgtggagctcacggtggtccagaggttccacgagcacgtgcaccagccttccgtgccgccctcgctgcgggccgtgctggggcggctcagtgctctgtacgccctgtggtccctgagccgccacgcggccctgctctaccgagctgaaagacgatgcagttgccctggtagacgtgatcgctcctcctgactttgttctggactcaccgattggcagagccgacggcgagctctacaaaaacctctggggcgctgtcctgcaggaaagcaaggtgttggagcgggcatcctggtggccagagttttctgtgaacaaacctgtcataggaagtctgaaatcgaagctctagtgggactggcacacattcagccaagtctaatgaaacgaagggaactaatcagacgtggacctcaacttctgattccagaacacgccggagattgctgctgctttctgagcccgcacctgtgcgcctaaactgctgattggcctcaactgcccaggcggacgggagggaggcacccggccggctggactaatctgggatcgcggtgatttgcagcgtggaaaagaaatgcagatgatcatgtctacctgatgcgccgtgggttttttgataattagaatttcgcacattcagttttcagggttcagctcctttctctaaagtaaacagcccattgtcagggatcttctggtcagacaacctgtgattcatctagattttttaccgagctccacttcattgagaagtcaatgatgccagtctggttctttgtcaactctccctcggctttgtcacataattgaattatgtcataaccttattaatttgcacatagatcatctgaatgtcgtggtttaagacttaaggaggaacatctgtttgattactttcttttgtggaactggaaatttccatcgaggaaatgtttttttaaaaagtctaatgatttgaatgggcaattcagtctccaaccgcccccctccccctgccgccagttatatacaaatcactttattggtaaaaaaaaaaaaaaaaaa

SEQ ID NO: 14 - DNA, 1403 bp, Homo sapiens
gggaagaaaagggaattccaacctgtggaaccttggggggtccccggggtcggcgccttcccattgactgtgggcggtgcaagggacggagcctctggcggctcgtgggggtgttggggtccgcagggggagggaggggagtgtcagagtgtgagcggggtacgggaattccaaatttgagggcctcccggctctggcgccggggagggagagctcaggccgccatgcgggacaggacccacgagctgagacagggggatgacagctcggacgaagaggacaaggagcgggtcgcgctggtggtgcacccgggcacggcacggctggggagcccggacgaggagttcttccacaaggtccggacaattcggcagactattgtcaaactggggaataaagtccaggagttggagaaacagcaggtcaccatcctggccacgccccttcccgaggagagcatgaagcaggagctgcagaacctgcgcgatgagatcaaacagctggggagggagatccgcctgcagctgaaggccatagagccccagaaggaggaagctgatgagaactataactccgtcaacacaagaatgagaaaaacccagcatggggtcctgtcccagcaattcgtggagctcatcaacaagtgcaattcaatgcagtccgaataccgggagaagaacgtggagcggattcggaggcagctgaagatcaccaatgctgggatggtgtctgatgaggagttggagcagatgctggacagtgggcaaagcgaggtgtttgtgtccaatatcctgaaggacacgcaggtgactcgacaggccttaaatgagatctcggcccggcacagtgagatccagcagcttgaacgcagtattcgtgagctgcacgacatattcacttttctggctaccgaagtggagatgcagggggagatgatcaatcggattgagaagaacatcctgagctcagcggactacgtggaacgtgggcaggagcacgtcaagacggccctggagaaccagaagaaggcgaggaagaagaaagtcttgattgccatctgtgtgtccatcaccgtcgtcctcctagcagtcatcattggcgtcacagtggttggataatgtcgcacattgttggcactaggagcaccaggaacccagggcctggccttctctcccagcagcctggggggcagggcagagcctccagtcggaccccttcctcacactggcccctatgcagaagggcagacagttcttctggggttggcagctgctcattcatgatggcctcctccttcaggcctcaatgcctgggggaggcctgcactgtcctgattggccgggacacacggttttgtaaaaaattaaaaaacaaaaaaagagcataaaaaaaaaaaaaaaaaa

SEQ ID NO: 15 - DNA, 1669 bp, Homo sapiens
agtcccgacgagcaacgcgtttgtagaggggtgggtgcgcacgctctgtccctgcgtgaccttccgaccccgctgtcctcaccgcaatggcggctgtgagggtcctggtggcctcgaggctcgctgcggcatctgcattcacgtccctgtcccccggcggtcggacgccttcccagcgcgcagcccttcacctctccgtgccgcgccccgcggccagggtcgcgctggtgctgtctggatgcggagtctacgatgggaccgagatccacgaggcctcggcgatcctggtgcacctgagccgtggaggggctgaagtccagatctttgctcctgacgtccctcagatgcacgtgattgaccacaccaaggggcagccgtccgaaggcgagagcaggaatgttttgaccgagtctgcgaggatcgcccgtggcaaaatcacagacctggccaacctcagtgcagccaaccatgatgctgccatctttccaggaggctttggagcggctaaaaacctgagcacgtttgccgtggacgggaaagattgcaaggtgaataaagaagtggagcgtgtcctgaaggagttccaccaggccgggaagcccatcggcttgtgctgcattgcacctgtcctcgcggccaaggtgctcagaggcgtcgaggtgactgtgggccacgagcaggaggaaggtggcaagtggccttatgccgggaccgcagaggccatcaaggccctgggtgccaagcactgcgtgaaggaagtggtcgaagctcacgtggaccagaaaaacaaggtggtcacgaccccagccttcatgtgcgagacggcactccactacatccatgatgggatcggagccatggtgaggaaggtgctggaactcactggaaagtgacgcgcatggacggggcccagctaggcgccaggacttggcctcaccctctggctgaggagctgtcggctgctttccatccagctgggagtctggcaggcccttttttttttttctttgccgaaacctgcaggcgttctctctctaaggaggatgtgctgcagtgcatgggggatgtttcttcctgggtgtggctgggctgctctcacatacagaggccgaggggccaattcgttctctgccacagggacttgcctcactgtgtcccaaaaacaaatcgcagccagcttttccagaaatagaaaattctgccgtctgaggttttatacttcaggttagttagtttttggaaggaagaacatttttaggtttgcaagcctcctgatcaggaaaccagaaataccacatttatggaccatgaaaggttggttcttgactctgaagggacttttgagttaatcagcgtaaggggatttctaaagcaggcaatccctgtagccgcagagaataaacgccttcccaaaatggcaacttcccacagccacatttcagacctgctgagactgctgagtgaggaatggcagtgaggtttcttcaattagtctcagttctcttaattttcaggaagaaagggaaattgcagcccctcagcccccaggattgacctctggggagtgatggtagcgttggtgccaggccgtgggttcaggtgtggcagaagcttgcagatgcgtccgaagggaaataaagtgtgttggcgttagactttgtgctgcaaa

SEQ ID NO: 16 - DNA, 2775 bp, Homo sapiens
gcagtccagatgtcgtcagcaccagcgcctgggctggaggacagagaagccttttccgttgccggtgccggcctagcgtcctggaattacttcaatcaacaggagcgagaacccgagcagcgccatgagcaacactaccgtcgtccccagcactgcaggtccgggccccagcggcgggcccggtggcggaggtggtggtggcggcggaggcggcggcaccgaggtaatccaggtgactaatgtctccccgagcgctagctctgagcagatgcggactctcttcggtttcctaggcaagatcgacgaactgcgcctcttcccgccggatgattcgcctttgccagtctcatctcgtgtctgctttgttaagttccatgatccagactcagcagttgtggcacagcatctgacaaacactgtattcgttgacagagctttgatagtcgtaccatatgcagaaggagttattcctgatgaagctaaagctttgtctctgttggcaccagctaatgcagtggcaggtcttctgcctggtggtggactcctgcctactcctaacccacttacccagattggcgctgttccactggctgctttgggggctcctactcttgatcctgcccttgctgcacttgggcttcctggagcaaacttgaactctcagtctcttgctgcagatcagttgctgaagcttatgagtactgttgatcccaagttgaatcatgtagctgctggtctcgtttcaccaagtctgaaatcggatacctctagtaaagaaatagaggaagctatgaaaagagtacgagaagcacagtccctaatttctgctgctatagaaccagataagaaagaagaaaaaagaaggcattcaagatcaagatcacgttctaggaggaggaggactccctcatcttctagacacaggcggtcaagaagcagatcgagacggcggtcacattctaagtctaggagtcggcgacgatccaaaagcccaaggcggagaagatctcattccagagaaagaggtagaaggtcaaggagcacatcaaaaacaagagacaaaaagaaagaagacaaagaaaagaaacgttctaaaacaccaccaaaaagttacagcacagccagacgttctagaagtgcaagcagagagagacgacgacgaagaagcaggagtggcacaagatctcctaaaaagcctcggtctcctaaaagaaaattgtcccgctcaccatcccctaggagacataaaaaggagaagaagaaagataaagacaaagaaagaagtagggatgaaagagaacgatcaacaagcaagaagaagaagagtaaagataaggaaaaggaccgggaaagaaaatcagagagtgataaagatgtaaaacaggttacacgggattatgatgaagaggaacaggggtatgacagtgagaaagagaaaaaagaagagaagaaaccaatagaaacaggttcccctaaaacaaaggaatgttctgtggaaaagggaactggtgattcactaagagaatccaaagtgaatggggatgatcatcatgaagaagacatggatatgagtgactgaatattgcctctgagggagtccaactgtatacctgcatcagtgtcattcctttgtgtgatttcttaatgctgtatttgttcatctcaaacctagatgtatacagctctgagttataaatggttataaagctcctgttactcatattagttatttacatcaaaaagcttttagaaaatggtacgaggtaaccaattcttgtcatggtgaaatctgattgagtaaccaagcagttttactattctggtgctgcttcataacaaaaatgaaaagctgcatgcatctacagcaggcatggattgtttatgtcgtatgatatcctttattaagtaagttcacttatagtatttctataatttgattcattgccgtaatagagccatgtaggaaatgcactgattgcatgttattgtggcaagaatatcctaaatgtcattaaaatcctccaacatgatggatctacttatggtcttgtttgttgacatgacaaattaacattcttatagttacatctggaaatgagcatttgaaatagataatcctttaagccttgtggcaaaatttttgtggcttttgtttaactttgaaaggttattatgcactaaccttttttggtggctaattagggtttaaatacagaaacaagatttcaaataaaactgtctttggcagtgagtaaatagcatattttgaagtagagttgtatactttttcataagatgtttgggaatttttttcctgaagtaataatttattccacatctacatcagtgaaagctatctacctatcctgagtctatcttaaaggaaaaaaagaaaaaaaccttatctcttgcccttattttgaattttccactctttcattaatttgttttaagctccgtgttggaaaaaaggggtagtgcattttaaattgaccttcatacgcttttaaaataagacaaatctacttgataatgtacctttatttgatctcaagttgtataaaaccaataaatttgtgttactgcagtagtaatcttatgcacacggtgatttcatgttatatatgcaaagtaggcaactgttttcttagttacagaagtttcaagcttcacttttgtgcagtagaaacaaaagtaggctacagtctgtgccatgttgatgtacagtttctgaaattgttttacaagactttgataataaaacccttaaactta

SEQ ID NO: 17 - DNA, 5004 bp, Homo sapiens
agcagtacggcgggaggcactagagggagctgcggccgctccggcccggccccgagcaccgcctccccagccagcgccgccgcgatggcggaggacagcgagtctgcggccagccagcagagcctggaactggacgaccaggacacgtgcgggatagacggggacaatgaggaggagacggagcacgccaaaggaagtcctggagggtatttgggagccaaaaagaaaaagaagaaacagaagagaaaaaaggagaaaccaaattccggaggcaccaagtcagactcggcatctgattcccaggagattaaaattcagcagccttcgaaaaatcccagtgttccaatgcagaagttgcaggatatccagagagcaatggagctgctatccgcatgccagggcccagccaggaacattgatgaggctgcaaagcacagataccagttttgggacacacaaccggtaccaaaactagatgaagtcataacatctcatggtgcaattgaaccagataaagacaacgtacgccaagaaccgtattctttgccacagggttttatgtgggacactttagacttgagtgatgccgaagtgctcaaggagttatacacgttgttaaatgagaattacgtagaagatgatgacaatatgttccgatttgactattcacccgagttcctgttgtgggctctgcgtccaccaggctggctcctgcagtggcactgtggggtcagagtgtcttcaaataaaaaactggtcgggttcataagtgccatcccagcaaacattcggatttatgacagtgtgaagaagatggtagaaatcaactttctttgtgttcataagaagttgagatcgaaacgggtagccccagtgctaatccgagagatcactagaagagtgaacctggaagggatcttccaggctgtgtacaccgcgggagtggttcttcctaagcccatagccacatgcagatactggcatcgatcactaaaccccagaaaattggtagaagtgaaattttctcacttgagtagaaatatgactttacagagaacaatgaagctatacagacttccagatgttacaaagacttcaggtttgagaccaatggaaccaaaagatatcaaatcagttcgagaattaatcaacacttacctgaagcagtttcatctggctccagtgatggatgaagaggaagtagcccactggttcctcccccgggagcacattattgacacgtttgtagtggagagccccaacggtaaactgactgatttcctgagcttctatacgctcccctccacggtgatgcaccaccctgctcacaagagcctcaaagccgcctactcattctacaacatccacacagagacgcccctgctggacctcatgagcgacgcgctcatcctggctaaatcgaaaggatttgatgtattcaatgcactggatttgatggaaaataagacattcttggaaaaactcaagtttggtataggagatggcaatttgcagtattacctgtacaattggaggtgtccaggtacagattctgaaaaggttggactagtactacaatagatggatatttttatttctagaactctgacatcatcatttgttaatatttaatgatttctggaactgccattccaaagaagaataaaagcacaactcaagtgaaattgaagtagtcgataatcagaaaagatgacaaaagtccacatgtgacatttgtacgtttctagctagaatgttaaacttcatcctttttttactgttgacctatttgtgggagggatgaaaggctacaaagagcacattcttgtaattttcaaatttttgcctgtctcttgaagaggtattttttcacccttagaaaagggactgtttttctatggactaagtagaagttacagagtcatgtaagaaaatctttgctattgtgtggagagaaattgctgcatttctgtttcttaagtgatggtacatttgtccatgtaacagaacaaaagatccatttggaaattttttttactggtatcaccttacatggtatcactgggaacatttatggaatcaacacttctgtagctcagtgacaggtggtggttgtttaagtgcagagcaatattaaaatgtactggtgactagtacatgtatttctccataagcagagttgccgaatcaataaacatgcaagtttgtactttgatctttaccaggtcagtggattgcttcaaaagcagagttttgtgcaagcactcactgtgctctctgaaagagcctgaggccgggcgtggtggctcacgcctgtaatcccagcactttgggaggccaaggtgggcagatcatgaggtcaggagatcgagaccattctggccaacatagtgaaaccccatctctactaaaaatacaaaaattagccgggcgtggtggcgtgtgcctgtagtcccagctgcttgggaggctgaggcaggagaatcgcttgaacctgagaggtgaggttgcagtgagccgagatcgagccactgcactccagcctgggtgacagagcgtgagactccgtctcaaaaaaaaaaaaaaagaaagagcctgtacccgcgactaactagacttttctgctgttgtgcaaagttcagtttcttctcagcaacatcaaggatatatgaagaaaaggaaataaaaaactgtaaagtcaaaagagatgcctggtggaacttattcgtgctatcagggcattgatagtttgaatgtttttattacttatgcaaaattgcacatactcctctatgctgattttatcatgaaaactgtcatgtgtcatgctaatggaaaatgtcttatttgtaaataagtattcataattttgttactgatggtgtttttaatctagaatttgaaaaactttcatggcttacagatgtgtgtttatattgccaataatctgcgggaaaaataagatgctaaccgaggccacgtagcctggcctcaactcagataccacaaagtagatgccttggctgggtgtggtggctcacgcctgtaatcccagcactttgggaggccaaggcgggcgaaacatttgaggtcaggggttcgagaccagcctggccaacatggtgaaaccccatctctactaaaaattcaaaaagaactagctgggtgtggtggcgggtgcctgtaatcccagctgctaggaggctgaggcaggagaatcacttgaacccaggaggcggaagttgcagtgagccaagatcgtgccactgcactccagcctgggtgacagtgcaagactccgtctcaaaaaacaaaagtagatacttttccctgcttttactgggccagtgcctaggaagttcagtgcagaagttaattgttttagacatgatggcatttccttcaagttatgagtccagtgaaaccaatcatatcttatcccaggcaggggccaccaaactatggcctgtgggctaaatccagcccattgcttatttttgtgtagcccacaggctaagaatgtttttattttctggaatggttgaggagaaaaagccaaaaaatgacatcattttgtgacatgtgcaaattacacaaaattcaaattccggtgtccctcaataaggttttattggaacatagccatactttttttttttttttttttaggacagggtctcactctattgtccaggctagaatacagtggcacagtcaacagctcactgcagccccaaactcctgggttaaaatgatcctcctgcttcagcgtctttttgaagaaaaagaactagctgggcgtgcataccaccacgcctggctaagtttttcattttttgtagagacaaggtcttgctatgtttcccgtgctggtctttaactcctggcctcaagtgatccttctgccttggcctcccaaagtactgggattatagacatgagccaccactcttggccacagccactttcatttacatattgcctatggctgcttcacactacaaagctgagttgagttgttgtgacagattgtgtggcctgcaaagcctaagatattcactctctggtcttttacagaaagtttgttgaccttggtcactacgaaggagttggaactctcctttctataggttgccgtgattctaaagaccaacccacagctgtgacatccctgagactaccaccagagggcgactgggccccacagtagtacataatataggacctctcttggagataatggaagacttggaatttcagatggttccaccctaattgcattagcgttctttcttaacaggagaaaggcttcaagaaacaaaacagtcctcattcactggaacagggtttgagataccagcattaagtaaatgagattttgacttaacctggagtcaaggctctaatttaggactttacttcccactcattttcatgccacaaagtctatacaaagtaggttttcaaataattgcagaatcagccaggcacggtggctcacacctgtaatccctgcactttgggaggccaaggtgagcagatcacttgaggtcaggagtcttgagaccagcctggccaacatggtgaagccctatctctactaaaattacaaaaactagccggacatgggggtgtgcacctgtaatcccagctattcaggaggctgaggcaggagaatcgcttgaacccaggaggcggggttgcagtgagccgggatcacaccactgcactccagcctgggcaacagagtgagactctatctcgaaagtaaaataaataactgcagcattgccagttggaaactttgtcatgagcttacctcacggtgacagttacactgctcctttaaagagtcatttacataatttgttatcaaattattaaccacttttaaatagaataataactacatttgcctccataattgaagcagattactaattaacattttcgagaattaaactgcttgcttatgaagtagctattaaaactaaattgaaatgc

SEQ ID NO: 18 - DNA, 3774 bp, Homo sapiens
attgcttctgactgtggaattggattctagctgtgtgtgtgttatatcctgttactgttgagacacagaggcgggagtcggcgggggaagatatgtgctgagattagtcagcctgccctccctctcccccaagaaactcaggccccatctggggagagtgagaacttaagaaacttgagacagggaaggagagccgggagcagccaaaacctgctaagtctcagaagactggtttctgcacaagggaatggaagaagtgactggaggtggctgtggattcaactctggcctgagattgattcccttgagataagttgttttctgcaaatccagtttgctgatgacatgcaggagttcaccaaattccccaccaaaactggccgaagatctttgtctcgctcgatctcacagtcctccactgacagctacagttcagctgcatcctacacagatagctctgatgatgaggtttctccccgagagaagcagcaaaccaactccaagggcagcagcaatttctgtgtgaagaacatcaagcaggcagaatttggacgccgggagattgagattgcagagcaagacatgtctgctctgatttcactcaggaaacgtgctcagggggagaagcccttggctggtgctaaaatagtgggctgtacacacatcacagcccagacagcggtgttgattgagacactctgtgccctgggggctcagtgccgctggtctgcttgtaacatctactcaactcagaatgaagtagctgcagcactggctgaggctggagttgcagtgttcgcttggaagggcgagtcagaagatgacttctggtggtgtattgaccgctgtgtgaacatggatgggtggcaggccaacatgatcctggatgatgggggagacttaacccactgggtttataagaagtatccaaacgtgtttaagaagatccgaggcattgtggaagagagcgtgactggtgttcacaggctgtatcagctctccaaagctgggaagctctgtgttccggccatgaacgtcaatgattctgttaccaaacagaagtttgataacttgtactgctgccgagaatccattttggatggcctgaagaggaccacagatgtgatgtttggtgggaaacaagtggtggtgtgtggctatggtgaggtaggcaagggctgctgtgctgctctcaaagctcttggagcaattgtctacattaccgaaatcgaccccatctgtgctctgcaggcctgcatggatgggttcagggtggtaaagctaaatgaagtcatccggcaagtcgatgtcgtaataacttgcacaggaaataagaatgtagtgacacgggagcacttggatcgcatgaaaaacagttgtatcgtatgcaatatgggccactccaacacagaaatcgatgtgaccagcctccgcactccggagctgacgtgggagcgagtacgttctcaggtggaccatgtcatctggccagatggcaaacgagttgtcctcctggcagagggtcgtctactcaatttgagctgctccacagttcccacctttgttctgtccatcacagccacaacacaggctttggcactgatagaactctataatgcacccgaggggcgatacaagcaggatgtgtacttgcttcctaagaaaatggatgaatacgttgccagcttgcatctgccatcatttgatgcccaccttacagagctgacagatgaccaagcaaaatatctgggactcaacaaaaatgggccattcaaacctaattattacagatactaatggaccatactaccaaggaccagtccacctgaaccacacactctaaagaaatattttttaagataacttttattttcttcttactcctttcctcttgatttttttcctataatttcattcttgttttttcatctcattatccaagttctgcagaccacacaggaacttgcttcatggctctttagatgaaatagaagttcagggttcctcactctagtcactaaagaaggattttactctcccagcccagaaaggtgattctttctttaccatttctggggactttagtcttaattaggtaccttattaacaggaaatgctaaggtaccttctctgtggaacaatctgcaatgtctaaatcgccttaaaagagcccatttcttagctgctgaaatcagtgctctttcacttcttcagagaagcagggatggtacctacccggcaggtaggttagatgtgggtggtgcatgttaatttcccttagaagttccaagccctgtttcctgcgtaaaggtggtatgtccagttcagagatgtgtataatgagcatggcttgttaagatcaggaggcccacttggatttatagtatagcccttcctccactcccaccagacttgctcatttttcgagtttttaactagactacactctattgagtttaattttgtcctctaggatttatttctgttgtccaaaaaaaaaaaaaaagaaaagaaaaattaaggagaatttttggtgttaatgctgaggaattgcttgagtggttagttgttaccaatttctcttttgaacctttggagctaaggatgctgagtctagagaaatgctagtctcaagccctgttaagtccctctgtttctagcccgtagttcatagcatcagtgaactggagccacaacagcaaattctatcagctgtgtaccatacagcttgtgctgaaggcgaatttcttgagccattactcagtataaagcactgagttctatctttaggatttatctttaagagcaaatttctggtcagctgtgcttctgcaacctaaaatatttaaagggaggtaggtgtgggcaggaggaggaatgataaattgggccagggcaagaaaaatctagcttcatataatttgtctgggactatacaccctatataatgttagttttacagaagtaatatgacttttgattgctacataccacaaagagtttatgaactgagatcataaagggcaactgatgtgtgaagaaagtagtcagtacatcctggctcatgctctgaaagaatatccagagaggctctctcaaagatcagggagatgtattcccatgccatgcaccctgcttcccagcatttctgcatggtcaagtgagctttatgctcatgagctttaagtatataattatccaggattttaaatcctcaacttgttctagcttgtgatccctcaaagttgggtcatacgttagtgctagatactagaaattttcacttttccactgatcagagagacagacattaaaaacaaaaatagaagaaaggaaagctttcaccctgcagcttcttagcagggaacaattgtcttgccaaaacttttttccctgtagatgttaacagttaaggcctattttcctcgggcacttaaccaaccaatcagaacaccacatctgttaggggaggtaacctggccaacagtgtatccatcacgttagccctgctggagggaagggacccacattcacctgccctctgacctgccccttgatcccatatctattaccgtgtccataggaataataggtaagggctctgtctctgtcaagccatgtaacaaaggacactgttaaaaaaaaaaaaaagtctggcatcagagggagcatgtggagagcaacttgggaagaacaagttcattttgtattgaatgatttttaatgaatgcaatattaatccttgcagatgagcaataatcattaaaatcgatt

SEQ ID NO: 19 - DNA, 1676 bp, Homo sapiens
caactgttgagcaggcctctctgcctgtggccttccggccggtttccagacgcccaggtggccaacattagagtccgcgtagcagtgtgagattgcaagttcacctgccactaccgctgccgcgcgctcgtctgcctggactgttgcgggccccgggacctgggctgggaacccgcggtggagcgggacacgaacgtggacgagcctgtggagtgggagacacctgacctttctcaagctgagattgagcagaagatcaaggagtacaatgcccagatcaacagcaacctcttcatgagcttgaacaaggacggttcttacacaggcttcatcaaggttcagctgaagctggtgcgccctgtctctgtgccctccagcaagaagccaccctccttgcaggatgcccggcggggcccaggacggggcacaagtgtcaggcgccgcacttccttttacctgcccaaggatgctgtcaagcacctgcatgtgctgtcacgcacaagggcacgtgaagtcattgaggccctgctgcgaaagttcttggtggtggatgacccccgcaagtttgcactctttgagcgcgctgagcgtcacggccaagtgtacttgcggaagctgttggatgatgagcagcccctgcggctgcggctcctggcagggcccagtgacaaggccctgagctttgtcctgaaggaaaatgactctggggaggtgaactgggacgccttcagcatgcctgaactacataacttcctacgtatcctgcagcgggaggaggaggagcacctccgccagatcctgcagaagtactcctattgccgccagaagatccaagaggccctgcacgcctgcccccttgggtgacctcttgtacccccaggtggaaggcagacagcaggcagcgccaagtgcgtgccgtgtgagtgtgacagggccagtggggcctgtggaatgagtgtgcatggaggccctcctgtgctgggggaatgagcccagagaacagcgaagtagcttgctccctgtgtccacctgtgggtgtagccaggtatggctctgcacccctctgccctcattactgggccttagtgggccagggctgccctgagaagctgctccaggcctgcagcaggagtggtgcagacagaagtctcctcaatttttgtctcagaagtgaaaatcttggagaccctgcaaacagaacagggtcatgtttgcaggggtgacggccctcatctatgaggaaaggttttggatcttgaatgtggtctcaggatatccttatcagagctaagggtgggtgctcagaataaggcaggcattgaggaagagtcttggtttctctctacagtgccaactcctcacacaccctgaggtcagggagtgctggctcacagtacagcatgtgccttaatgcttcatatgaggaggatgtccctgggccagggtctgtgtgaatgtgggcactggcccaggttcataccttatttgctaatcaaagccagggtctctccctcaggtgttttttatgaagtgcgtgaatgtatgtaatgtgtggtggcctcagctgaatgcctcctgtggggaaaggggttggggtgacagtcatcatcagggcctggggcctgagagaattggctcaataaagatttcaagatcctcaaaaaaaaaaaaaaaaa

SEQ ID NO: 20 - DNA, 1716 bp, Homo sapiens
cattttgaatgtgcagctgcagcgggcgtgagttgggggaggacgggttgccgactcgcctacctagcggtctcttgattgtcgatattttgttggcataggtttatgtagagacgtatacatatatatagacacactgtctataaatctaggcctgtatccggtgtccgaggcgaactcagtaagatgatgttaagaggaaacctgaagcaagtgcgcattgagaaaaacccggcccgccttcgcgccctggagtccgcggtgggcgagagcgagccggcggccgcggcagccatggcgctcgctcttgccggggagccggcaccgcccgcgcccgcgcctccagaggaccacccggacgaggagatggggttcactatcgacatcaagagtttcctcaagccgggcgagaagacgtacacgcagcgctgccgcctcttcgtgggaaatctgcccaccgacatcacggaggaggacttcaagaggctcttcgaacgctatggcgagcccagcgaagtcttcatcaaccgggaccgtggcttcggcttcatccgcttggaatccagaaccctggctgaaattgcaaaagcagagctggacggcaccattctcaagagcagacctctacggattcgcttcgctacacatggagcagccttgactgtcaagaacctttctccagttgtttccaatgagctgctagagcaagcattttctcagtttggtccagtagagaaagctgttgtggttgtggatgatcgcggtagagctacaggaaaaggttttgtagagtttgcagcaaaacctcctgcacgaaaggctctggaaagatgtggtgatggggcattcttgctaacaacgacccctcgtccagtcattgtggaacccatggagcagtttgatgatgaagatggcttgccagagaagctgatgcagaaaactcaacaatatcataaggaaagagaacaaccaccacgttttgctcaacctgggacatttgaatttgagtatgcatctcgatggaaggctcttgatgaaatggaaaagcagcagcgtgagcaggttgatagaaacatcagagaagccaaagagaaactggaggcagaaatggaagcagctaggcatgaacaccaattaatgctaatgaggcaagatctaatgaggcgtcaagaagaactcagacgcttggaagaactcagaaaccaagagttgcaaaaacggaagcaaatacaactaagacatgaagaggagcatcggcggcgtgaggaagaaatgatccgacacagagaacaggaggaactgaggcgacagcaagagggctttaagccaaactacatggaaaatggtgataaaagaaaatgtggctgaagttacccgaagttcagcttgcagtgtaattcagaagagttaagaccagaagtactggaatcatacttcctttcagtcttgccacttgcctagtgaggcttttccgaacctggaaggagacgtctagaaatcccaactttgctgtgtaaggaccattagctgcaagtcagtggaagtctatagaaagcagtgtgaattccatagtggtcttgacttcttagcaaggatttgggataagtctaaaacttcagacttaaagctttgaagcatgttaactgcatgaaatattaaacatttcgaacttcaaaaaaaaaaaaaaaaaaaaaaaaaaaaaaaaaaaaaaaaaaa

SEQ ID NO: 21 - DNA, 5956 bp, Homo sapiens
gtgaactctgaccttagctttccgtagcgcccgcgtctgccgcccccgcccccggagcgaaggaggcgggctttggccttttgccctagggagcgagtgcggagcgagtgggagcgagacggccctgagtggaagtgtctggctccccgtagaggcccttctgtacgccccgccgcccatgagctcgttctcacgcgaacagcgccgtcgttaggctggctctgtagcctcggcttaccccgggacaggcccacgcctcgccagggagggggcagcccgtcgaggcgcctccctagtcagcgtcggcgtcgcgctgcgaccctggaagcgggagccgccgcgagcgagaggaggagctccagtggcggcggcggcggcggcagcggcagcgggcagcagctccagcagcgccagcaggcgggatcgaggccgtcaacatggcgagcgcctcgtaccacatttccaatttgctggaaaaaatgacatccagcgacaaggactttaggtttatggctacaaatgatttgatgacggaactgcagaaagattccatcaagttggatgatgatagtgaaaggaaagtagtgaaaatgattttgaagttattggaagataaaaatggagaggtacagaatttagctgtcaaatgtcttggtcctttagtgagtaaagtgaaagaataccaagtagagacaattgtagataccctctgcactaacatgctttctgataaagaacaacttcgagacatttcaagtattggtcttaaaacagtaattggagaacttcctccagcttccagtggctctgcattagctgctaatgtatgtaaaaagattactggacgtcttacaagtgcaatagcaaaacaggaagatgtctctgttcagctagaagccttggatattatggctgatatgttgagcaggcaaggaggacttcttgttaatttccatccttcaattctgacctgtctacttccccagttgaccagccctagacttgcagtgaggaaaagaaccattatcgctcttggccatctggttatgagctgtggaaatatagtttttgtagatcttattgaacatctgttgtcagagttgtccaaaaatgattctatgtcaacaacaagaacctacatacaatgtattgctgctattagtaggcaagctggtcatagaataggtgaataccttgagaagataattcctttggtggtaaaattttgcaatgtagatgatgatgaattaagagagtactgtattcaagcctttgaatcatttgtaagaagatgtcctaaggaagtatatcctcatgtttctaccattataaatatttgtcttaaatatcttacctatgatccaaattataattacgatgatgaagatgaagatgaaaatgcaatggatgctgatggtggtgatgatgatgatcaagggagtgatgatgaatacagtgatgatgatgacatgagttggaaagtgagacgtgcagctgcgaagtgcttggatgctgtagttagcacaaggcatgaaatgcttccagaattctacaagaccgtctctcctgcactaatatccagatttaaagagcgtgaagagaatgtaaaggcagatgtttttcacgcatacctttctcttttgaagcaaactcgtcctgtacaaagttggctatgtgaccctgatgcaatggagcagggagaaacacctttaacaatgcttcagagtcaggttcccaacattgttaaagctcttcacaaacagatgaaagaaaaaagtgtgaagacccgacagtgttgttttaacatgttaactgagctggtaaatgtattacctggggccctaactcaacacattcctgtacttgtaccaggaatcattttctcactgaatgataaatcaagctcatcgaatttgaagatcgatgctttgtcatgtctatacgtaatcctctgtaaccattctcctcaagtcttccatcctcacgttcaggctttggttcctccagtggtggcttgtgttggagacccattttacaaaattacatctgaagcacttcttgttactcaacagcttgtcaaagtaattcgtcctttagatcagccttcctcgtttgatgcaactccttatatcaaagatctatttacctgtaccattaagagattaaaagcagctgacattgatcaggaagtcaaggaaagggctatttcctgtatgggacaaattatttgcaaccttggagacaatttgggttctgacttgcctaatacacttcagattttcttggagagactaaagaatgaaattaccaggttaactacagtaaaggcattgacactgattgctgggtcacctttgaagatagatttgaggcctgttctgggagaaggggttcctatccttgcttcatttcttagaaaaaaccagagagctttgaaactgggtactctttctgcccttgatattctaataaaaaactatagtgacagcttgacagctgccatgattgatgcagttctagatgagctcccacctcttatcagcgaaagtgatatgcatgtttcacaaatggccatcagttttcttaccactttggcaaaagtatatccctcctccctttcaaagataagtggatccattctcaatgaacttattggacttgtgagatcacccttattgcaggggggagctcttagtgccatgctagactttttccaagctctggttgtcactggaacaaataatttaggatacatggatttgttgcgcatgctgactggtccagtttactctcagagcacagctcttactcataagcagtcttattattccattgccaaatgtgtagctgcccttactcgagcatgccctaaagagggaccagctgtagtaggtcagtttattcaagatgtcaagaactcaaggtctacagattccattcgtctcttagctctactttctcttggagaagttgggcatcatattgacttaagtggacagttggaactaaaatctgtaatactagaagctttctcatctcctagtgaagaagtcaaatcagctgcatcctatgcattaggcagcattagtgtgggcaaccttcctgaatatctgccgtttgtcctgcaagaaataactagtcaacccaaaaggcagtatcttttacttcattccttgaaggaaattattagctctgcatcagtggtgggccttaaaccatatgttgaaaacatctgggccttattactaaagcactgtgagtgtgcagaggaaggaaccagaaatgttgttgctgaatgtctaggaaaactcactctaattgatccagaaactctccttccacggcttaaggggtacttgatatcaggctcatcatatgcccgaagctcagtggttacggctgtgaaatttacaatttctgaccatccacaacctattgatccactgttaaagaactgcataggtgatttcctaaaaactttggaagacccagatttgaatgtgagaagagtagccttggtcacatttaattcagcagcacataacaagccatcattaataagggatctattggatactgttcttccacatctttacaatgaaacaaaagttagaaaggagcttataagagaggtagaaatgggtccatttaaacatacggttgatgatggtctggatattagaaaggcagcatttgagtgtatgtacacacttctagacagttgtcttgatagacttgatatctttgaatttctaaatcatgttgaagatggtttgaaggaccattatgatattaagatgctgacatttttaatgttggtgagactgtctaccctttgtccaagtgcagtactgcagaggttggaccgacttgttgagccattacgtgcaacatgtacaactaaggtaaaggcaaactcagtaaagcaggagtttgaaaaacaagatgaattaaagcgatctgccatgagagcagtagcagcactgctaaccattccagaagcagagaagagtccactgatgagtgaattccagtcacagatcagttctaaccctgagctggcggctatctttgaaagtatccagaaagattcatcatctactaacttggaatcaatggacactagttagatgtttgttcaccatggggaccattacatatgaccatacaatgcactgaattgacaggttaatcataagacatggaaagagaagtgtctaaaagcttcaaaatgttccacttttttttccttcatggagactgtttgtttggctttcttccattgttgtttttgtagcatttatttcagaaatgtgtatttccataatccagaggttgtaaaaccactagtgttttagtggttacagcaacatttgaaatggaaactaaaagttaggattttatggagtatggagatagggtccagtatctatttaccctgtaatgtttaggattaaaatgttaaaattttgtgaccatgaatttctttcttttataaattttctcatttaaaaatcaaaaatcttgcaaaacaaaaaccatgtttctttttcttgtataactttttgttttcagcaacataaattgatttttagctggcagacaagaatatccatataagatttgttaaccatttcagagagtttggcaatttttaaaagataataaggtatcatttttaagtatgaaaattaacaatatccctgttgcgcacactaattttgcatgagtaagtttacaaatatgtatcgtctgtaaagcagcatgtgcagattattcataatatagaagttaaaataagtattagtgcaattttcagatatttatttttgcacagaaaacacattatctggagagaaagaaaggagaatttttgagacttgggttttcttaatgccagtgtgaatttgcagatgttttcagaaaatcaagtcacagtaacaatttgccacttttttctattataaatcttcttacttaaattttgaatatttagtttttctcagttacccatttgtgtgtgtgtgattccacttagaaattcttaaaaccagatttttctttcattccgtttggatgtctacattccttatcaaaggatataaatactgtgtatgcttttgaattttatttttaggaaaattctgaagccagctatcacaggtttgttagctaataatagtattttcttttagttgagttaggtttttccccatctcctgtagagcgaatttacatattgtattgggtaagtgttcactacttttcctgattaagggatctgtgctggggaacaaagcttttgcagtaccttatattgtagttaaaattttatttaacatatccttcagtgagctcatttcacactgtagcctcttccttaaaatttgtggtgctcctgtaacagtaagaactaattctgaaataaaagacatctcctaatgctgtgcaaacatagtttacatgtattgaaggaggcagttgttaaattgagtgaccaatttaagcaatcagatatttgaaaactgcaccctttagttttgaaactgtgaattagaaacacttttcctgctgtattactacctgctttaacatccaaatatacagtgattttaaatgataacatactgtggttattagattaacagcttgattttgaatgttcagatgataatgcagaagacatcacttctagtaaggattttgactagtgcattgatgttgaagttggtgccatttcaaaatgtggcaggtgataatcttttaccataatttgcataaaactgtaatagaagtttattttgagatgttagtatattatgtactatgcatttctgtggtatagatgttgtggatatatttaagtatttggttacatggttttacaataaattacaatactgcaggcaaaaaaaaaaaaaaaaaaaaaaaaaaagaaaaaaaaaaaaaaaaaaag

SEQ ID NO: 22 - DNA, 2478 bp, Homo sapiens
atcggccgccgttgcgcggcgcagagcggcagcaagatggcggcgcaacagcgggactgcgggggtgctgcgcagctggcggggccggcggcggaggctgaccccctaggacgcttcacgtgtcccgtgtgcttagaggtgtacgagaagccggtacaggtgccctgcggacacgtcttttgctctgcatgcctgcaggaatgtctgaagccgaagaagcctgtctgtggggtgtgtcgcagcgctctggcacctggcgtccgagccgtggagctcgagcggcagatcgagagcacagagacttcttgccatggctgccgtaagaatttcttcctgtccaagatccggtcccacgtggctacttgttccaaataccagaattacatcatggaaggtgtgaaggccaccattaaggatgcatctcttcagccaaggaatgttccaaaccgttacacctttccttgtccttactgtcctgagaagaactttgatcaggaaggacttgtggaacactgcaaattattccatagcacggataccaaatctgtggtttgtccgatatgtgcctcgatgccctggggagaccccaactaccgcagcgccaacttcagagagcacatccagcgccggcaccggttttcttatgacacttttgtggattatgatgttgatgaagaggacatgatgaatcaggtgttgcagcgctccatcatcgaccagtgagcagagtccgtgcttgctatctgtctcatgttacagagcttccattacatattaaacgtgaaatctatgactcctgtaccttacctgttcaacagacctgaaaatgagccatggcattgggacagggtcacttctgacaggggaagtgggtccccaggtcagcccttctcttccctttgggctcttgccaaagctgtcttcccctactgttaaccttgtttgtcacacggtcgagttcgtattggttctcggctacttcctggagcttctgccgcctcctgtggaagataatctagcttctccacctcttgtttcacactcattcctcccatccagtgtttgtctctcgggtccttcaagccagccaggaccttttctgggtcatgaatagcacaatgaagcaagtgtctcctttccttgtccccaaggtgtgcagactttggcagccgtgcacctgaccagagctgaagctcccgctgggctgtggggttgccagaagctggggttgccatcccggggtacatgtcaccagtcctcttggggttttgtaccatctgatgctggaagttttgattagtgatattttctactactacatatttagagttcactggttcagtcttaaatgcctgcatggtgcctttttaggataaggtataaccatacatttttggtggaagtgtttctgggttagggaagttaaagtctgtttatccgtaagtggggaggagggtcagctaagagaagtgggagggccagagctttttggttctgatttacaaattaatgaagtagtttcaaacaacgcggtcatgtttacctctccatttgggagcctgcctacattcttgttctagaagcacaaaaaatcctcagatgaattagaagaaagaggtttggggactcagcggatactagttcttttaccttctgcttggtaacttagattaaactgagcattgtttttctgtcacaaatgttttccttatgacactggtttcgacatgtaaaatgtgtttgaaaacctgctttgtagatgcagagagaagctataggaaacccagtaccacccctggtctgttctgacgagacatcgttcataaggcacagcacatcgcaagatgaacagttgttaataaaagctgttgctggaaacttgctttaggaacagctcaagaaccttggagttcatatttcacaaatattaataaatataagtccaagagctgtcagcctaatctgtaggagcagaacctctgattgaccaaaaggcatatgggtttaggttggttttttgatgtcatatgtctctgatggggctgcaagtgctacctcgcgcttgtacactgctgctgtggggctccgcgcctgccggtgaagagctgcagatgccgagaagccagcaaacacagggcccactggaaaaaaatagttttttcattagtatttctcgggaggacccaaaagttaaggtcagcttgttcactgtaatttctggaagaagttcactcagaccttcctgaattcagatcatctcagaagtctggagggaaatctggcgaaaccttcgtttgagggactgatgtgagtgtatgtccacctcactggtggcaccgagaaacttacttccttgtattaagtgcacttcttgtatttctaataagatgactttccagaaagtgagatttgttatgttctggcttttaaaaggtaaaatataaataaatttcataacttaatctaaaaaaaaaaaaa

SEQ ID NO: 23 - DNA, 1741 bp, Homo sapiens
gatcgggcggcgccgagctgaggtggtgagggactagctcccggatgtggagaagctggggagaaggcgtgggaggaagatggactcggtggagaagggggccgccacctccgtctccaacccgcgggggcgaccgtcccggggccggccgccgaagctgcagcgcaactctcgcggcggccagggccgaggtgtggagaagcccccgcacctggcagccctaattctggcccggggaggcagcaaaggcatccccctgaagaacattaagcacctggcgggggtcccgctcattggctgggtcctgcgtgcggccctggattcaggggccttccagagtgtatgggtttcgacagaccatgatgaaattgagaatgtggccaaacaatttggtgcacaagttcatcgaagaagttctgaagtttcaaaagacagctctacctcactagatgccatcatagaatttcttaattatcataatgaggttgacattgtaggaaatattcaagctacttctccatgtttacatcctactgatcttcaaaaagttgcagaaatgattcgagaagaaggatatgattctgttttctctgttgtgagacgccatcagtttcgatggagtgaaattcagaaaggagttcgtgaagtgaccgaacctctgaatttaaatccagctaaacggcctcgtcgacaagactgggatggagaattatatgaaaatggctcattttattttgctaaaagacatttgatagagatgggttacttgcagggtggaaaaatggcatactacgaaatgcgagctgaacatagtgtggatatagatgtggatattgattggcctattgcagagcaaagagtattaagatatggctattttggcaaagagaagcttaaggaaataaaacttttggtttgcaatattgatggatgtctcaccaatggccacatttatgtatcaggagaccaaaaagaaataatatcttatgatgtaaaagatgctattgggataagtttattaaagaaaagtggtattgaggtgaggctaatctcagaaagggcctgttcaaagcagacgctgtcttctttaaaactggattgcaaaatggaagtcagtgtatcagacaagctagcagttgtagatgaatggagaaaagaaatgggcctgtgctggaaagaagtggcatatcttggaaatgaagtgtctgatgaagagtgcttgaagagagtgggcctaagtggcgctcctgctgatgcctgttctactgcccagaaggctgttggatacatttgcaaatgtaatggtggccgtggtgccatccgagaatttgcagagcacatttgcctactaatggaaaaggttaataattcatgccaaaaatagaaattagcgtaatattgagaaaaaaatgatacagccttcttcagccagtttgcttttatttttgattaagtaaattccatgttgtaatgttacagagagtgtgatttggtttgtgatatatatatattgtgctctacttttctctttacgcaagataattatttagagactgattacagtctttctcagatttttagtaaatgcaagtaagaacatcatcaaagttcactttgtattgtaccctgtaaaactgtgtgtttgtgtgctttcaaagatgttgggattttatttatctggggacagtgtgtatggtaagacatgcccttctattaataaaactacatttctcaaacttga

SEQ ID NO: 24 - DNA, 1876 bp, Homo sapiens
ccgaaaccggcgcggagcaactgaggcccgagccttctcgggacccgggggacgcctaaccccgcgagatgaggaaactgaggccgcgaggagcgcgcacacagcagagaagcagcagaatcgggaatcaaacccagctctgtctgaccccagagcctgtgcccttaaccactggctaggctgaactgcctttgttcttcactgtccccatcacctctttcaaacctcagcctctccttcctcatcgttacatctctaggctgcacctggtctctaaacattcacacaacccctgcaaattttcttcctcataattgggagaagactcactggccgaatggcagcagtagatgacttgcaatttgaagaatttggcaatgcagccacttctctgacagcaaacccagatgccaccacagtaaacattgaggatcctggtgaaaccccaaaacatcagccaggatccccaagaggctcaggaagagaagaagatgatgagttactgggaaatgatgactctgacaaaactgagttacttgctggacagaagaaaagctcccccttctggacatttgaatactaccaaacattctttgatgtggacacctaccaggtctttgacagaattaaaggatctcttttgccaatacccgggaaaaactttgtgaggttatatatccgcagcaatccagatctctatggccccttttggatatgtgccacgttggtctttgccatagcaattagtgggaatctttccaacttcttgatccatctgggagagaagacgtaccattatgtgcccgaattccgaaaagtgtccatagcagctaccatcatctatgcctatgcctggctggttcctcttgcactctggggtttcctcatgtggagaaacagcaaagttatgaacatcgtctcctattcatttctggagattgtgtgtgtctatggatattccctcttcatttatatccccaccgcaatactgtggattatcccccagaaagctgttcgttggattctagtcatgattgccctgggcatctcaggatctctcttggcaatgacattttggccagctgttcgtgaggataaccgacgcgttgcattggccacaattgtgacaattgtgttgctccatatgctgctttctgtgggctgcttggcatacttttttgatgcaccagagatggaccatctcccaacaactacagctactccaaaccaaacagttgctgcagccaagtccagctaatgaggaaattctcttttgttttttggagcatggttctttgggaagtggcatccactgcaggaaagcagaatgagcagagccagcagaactgatggagtggcacaaattcccagtgtctggatggtgccacactggcgcctaatcacccgtttaacaagcagaaattaaatgttgctcagcacatgtgtctttcagctcttccttttcacccatggatgatcattgcgagcatgcgctgattggactgaaatgccggggaataggttaggcatgctcagtgccgtccctttgccaccacagtcaaatgacatgcttcactgtggtaccttaatacctgaaatagaaccatggaaaattctgatgtcctctctctgaattatgtacagactacctgggggatcctcttctctccaaatgttagccatcctgaagtagccgaacagtagaaactttggtggggattaactgggagcttgaaaatttgtctttggtaacctgatactggacagctgaactgaatggctgcaaaataaatacctcacatgaaaaaaaaaaaaaaaaaaaaaaaaaaaaaaaaaaaaaaaaaaaaaaaaaaaaaaaaaaaaaaaaaaaaaaaaa

SEQ ID NO: 25 - DNA, 5980 bp, Homo sapiens
gaccgcgcgcggctagccgctggggaagcgactctgagtcccgggctcggagcgcaggctcagctccgcgctgcgagcgctacgggcgcaggggcggggagccggcccggagcgcagtttccagtggggccggggtttcacccgggccctctctgtttgaaccgaacccgacaaatgggcgcatgacgatggagagcagggaaatggactgctatctccgtcgcctcaaacaggagctgatgtccatgaaggaggtgggtgatggcttacaggatcagatgaactgcatgatgggtgcactgcaagaactgaagctcctccaggtgcagacagcactggaacagctggagatctctggagggggtcctgtgccaggcagccctgaaggtcccaggacccagtgcgagcacccttgttgggagggtggcagaggtcctgccaggcccacagtctgttccccctccagtcaaccttctcttggcagcagcaccaagtttccatcccataggagtgtctgtggaagggatttagcccccttgcccaggacacagccacatcaaagctgtgctcagcaggggccagagcgagtggaaccggatgactggacctccacgttgatgtcccggggccggaatcgacagcctctggtgttaggggacaacgtttttgcagacctggtgggcaattggctagacttgccagaactggagaagggtggggagaagggtgagactgggggggcacgtgaacccaaaggagagaaaggccagccccaggagctgggccgcaggttcgccctgacagcaaacatctttaagaagttcttgcgtagtgtgcggcctgaccgtgaccggctgctgaaggagaagccaggctgggtgacacccatggtccctgagtcccgaaccggccgctcacagaaggtcaagaagcggagcctttccaagggctctggacatttccccttcccaggcaccggggagcacaggcgaggggagaatccccccacaagctgccccaaggccctggagcactcaccctcaggatttgatattaacacagctgtttgggtctgaatcctagagacagaaagttgactgagcctgaaagggccaggtcccagtgctgggcccctggggaggagggagggtgggcggtatggctctcgaaagcccaactccaagttcctttcccccagaaagcggggagaagccagagttcttggctcaggactgaagggaaggtggttgggagaggctgtcttgggggctagctggtggaggaggtaagagtagctggagagtgagctgtgcgtgtgtgtgtgtgtgtgtgcatgtgtgtgtctgtctggcatgcatgcactcactttggggctggaggtgacagtaggtgagggcagaggaggagatcagaaaatccctctgacatctccactgcccccaaagacctccgttgaacattctgtatggaaaagagccctggagcatcaggttccccagataggcccccaaataaagacctgtctatggctctcccaaccttctgtcagcttctttggcaagacattgctccaggcacagggactgaaccccaggcctcctgggactggagcagcagtgaggcaaaacccgacctgctagccctttctgccttggaggtttcagtccatacctggactctgagaaaatgagctgaataaggagtacagtgtgtaaggagcagccagggaagccctagacactccccgcgtctcccccatgcacaggggaaggatgttgacatagcactgggctgtttgaatgccttttcatctccatggtctcatttgaaagtgagcgaggcaggcaggcatgatcccattttccagataaggaaacaagcctagatatgctacatgtccaggaacaactgcagccaggaggcagaacagcctaggtctaactgcagagtagaagctggaccctggagttaccaacactcctccccaacagttcttagcaccccgcaggctgggcgctgtggctcacgcctgtaatcccagcactttgggagggcaaggcaggcggattacctggggtcaggagttcatgaccagcctggccaacatggtgaaaccccgtctctactaaaaaaatacgtaaaaattagccaggcgtggtggcacacgcctgtaaacccagctacttgggaggctgaggcaggagaattgcttgagcccgggagagggaggttgcagtgaggcgagatcatgccactgcactccagcctggctgacagagcaagactcccctgtctcaaaaaaaataaaaaaaaacagttcgtagggccccataccccacaacccctgtctcctgcacttaactcccacctgggtcagagaacagccaattcaccagtgaggtagaagtgaacccagaagaaatagccacttgattttaaaattcccagctccattccgtggccttctccccactagacacagcagtcccaggcctcctgttccctcctcacctagaggcagccgggacggagggggaagggccaggcagcagctcagctccggcttctctaaagccactctgggcacgtggcccaggagggccacctagtgatccaggcccccccccaggactgccctgggaagccactgtccctcccactccagtagggaacactcactggctgggaaaagacaatgtggatcttcttttgggctgaccaagccaggagggcacaccctcccactgcccctctctgcctcccactgattgtccctcagcctgatggggtgtgacagctgcaattagaggcaggattccttcccaccctcaaagcattaatagccagttggagaggcaaaatagtaagaaaaggctcttctgcttgcttcctggatccctggggagagtggagagaggggcagagctcaagatgggattatgggggcgcagccgcggtggttagggtcactctcaaatcctacccagtcaaatggtaagatgtttcatttttggtgggggagctgcaggagggaggaaggcgctcatgctttttgggttttgttgagcactcactgtctgtcaggtaatgtgcacatctctcaaacttagaaggaccctagaaggcattgttctccagacacatctatggaggttattagggggcgtgtaaactgccccgattaggctgctagcaaaggaaaggacagagatttgaacagagggttgggttatctggctccaaaacccctgtccttttcttgctatttctctacctggagtttgccaactgagcaagcccactctggtggagccagccactgcaaatcctttgtgtcttcccagagaataccaacatttcagttttgagtgagggaacgttggctctgactgcctttggaggtggagatggtggaggtggtggtggtggtggtggtagtggtggtgtgtgtgtgtgtgtgtgtgtgtgtgtgtgtgtgcctgcgcgtgctaagaaactgcatgttaagattccacctactgaatcatgagcggaggaagtcgtgggacactggctggtggagaagccatctagcatattattcaagatgacaccagctccaagtctggaatgagtctgtgggaaaccaaggtacttcttggacattcacctataactcacgtgtttcgtggactggtcacagtggttcggataaattgaacagaactttatgaacacctcccagcaccaggtgttgttatagaaactaagaacagagcaatgagaaggacccaactcctgctctcaaatggatgcagtggaaaataagcagactttgaaccattggttagtcagaagagacttgggagactgaaaacttgtttcaacttgggccagaacaaaaaattaggaagcaacacttgctgccaacatgatttacaagtgccagcaccttcacctctgttacttccttctcactacacactgaaagcagttgctcttgttttacatggacaggctcagagaagttaagcaacttgtccaaggtcacacagtagtggaattgagattgaatcagttccaactgacttgcaatcttgtgcttttcagacgatcccactaattgtccatatctgttccaaagccaaatcaagaggaacaagagcaaaatctgtcctctcatattattcatggtcctgcgtggatcataaatggcatgctgactgtctgatggagacttacttttcccttccccctggacacctgccatggcaatgacagaggctgtattttactgaagtggagggaagaggtgaatgcaaatgcctagggcctaagtatacaggaaggtgtagggagaggtaagcagtgtgtatgtggaggagatagcagacgtaagcagagagaaatcagagagcttagttcttcctctggggcgcactttgtggttaattaggacatgcaaatgagctagaagctcatttaatatcctccctgacatgtagccccaccccaccctgccccacttccctggcaggtacaagggccacctgattggcccaggtatctgtggaaggttccacctgcttctttgtggcccagggaacagaaaagagtccctgctgggcatgctagtggggccggcctggtctccctcctccctttctcttcccaacctttcagacttgggacctctcttttccctctccctcagacacttcccttgtgccccgcccctcagggtgatctctgaacccaaacttgccccaaagaaggttgctctgtcctctccacatccccatctcctccctagggccttgttggggagaggctcctccatctttcccaagtcacaccatcgtttcctacgtggtctggacaagagcaagagcacaccttgtccccaccttctccagagcagccagaacccacctcaggtgccttccccatccggtgcagttaaggcacttctgccagcaccatggtatgagcactagacttggagttaagatttgagagccccctctgtcactgtggaagcttgagcatgttgcttgatctctctgaaccttgtgtttctcatctgtgaaaggtgataatgtggggctgctgtgagatttaaaggacataatgcacctacggtccaagcactgcctggaatacagcagaagctcagcagatactggacaacccatccccttagtagaggcactaaccatgtgacccaaggcaaaagtgcttaagaaaaagtgctttctctgagcgttggtctcttcttctgtcgaaacatttatattgatttaatatctcacaggattgtagcaagggtcagagaagacaataggtgacatgtttttgtacactgtatactagccacccagatgggctgttatttgctaaatggcaaatttacactgttccccaaaggatgacatgcactggggaggcggggggtgtggaggtggagaaaggctgagcttggagaaaaggtgcttgaggaccccactgcctaaggacctgctctaggaaacattcccactccctacaccctagctgcccctcacagtcaacccttaaggacctcaaattcttggcaaggggtaaagagttgaaagtgccaagtcctagtggttttgagaagcctctggtctgctctttctgctctgtaaagtcttagttgccagagtcccctatagcccccacatcgctcccttcctcctgccctccggccaccctggaaactaatggcctaaaggtgctgtggctgtcctcctaaaatccattccctcctgatggggtggaggaatctgtgaagcccaccttcaggagaggtctcggggctcgggctggtgctgccagagaaagggtgactgaaccagaaaggcctaggggaaagcagctcaaactgcagccatccccttagtacgattactaggatgtcccttgccttccttttgcctcctccacccaacccctaaaataaacagtatgatgaaacctc

SEQ ID NO: 26 - DNA, 4868 bp, HOMO SAPIENS
agttagcgcctgctgggtgtctgctcgggtggtctgggaactacaattcccggcgggctgtgagatgccttggctgtagttagtaaggagccggatgattgcctcagcaggtgtgaagcgtgtgctttagtttcgtgggaggcctggcatccccgagagggaggggaaaggtaaccactcctttgtggaggtcgccagggtcattgtcgtggatttgcacagtcggctgggcggtgcaatggcggaaagaaaaggaacagccaaagtggactttttgaagaagattgagaaagaaatccaacagaaatgggatactgagagagtgtttgaggtcaatgcatctaatttagagaaacagaccagcaagggcaagtattttgtaaccttcccatatccatatatgaatggacgccttcatttgggacacacgttttctttatccaaatgtgagtttgctgtagggtaccagcgattgaaaggaaaatgttgtctgtttccctttggcctgcactgtactggaatgcctattaaggcatgtgctgataagttgaaaagagaaatagagctgtatggttgcccccctgattttccagatgaagaagaggaagaggaagaaaccagtgttaaaacagaagatataataattaaggataaagctaaaggaaaaaagagtaaagctgctgctaaagctggatcttctaaataccagtggggcattatgaaatcccttggcctgtctgatgaagagatagtaaaattttctgaagcagaacattggcttgattatttcccgccactggctattcaggatttaaaaagaatgggtttgaaggtagactggcgtcgttccttcatcaccactgatgttaatccttactatgattcatttgtcagatggcaatttttaacattaagagaaagaaacaaaattaaatttgggaagcggtatacaatttactctccgaaagatggacagccttgcatggatcatgatagacaaactggagagggtgttggacctcaggaatatactttactcaaattgaaggtgcttgagccatacccatctaaattaagtggcctgaaaggtaaaaatattttcttggtggctgctactctcagacctgagaccatgtttgggcagacaaattgttgggttcgtcctgatatgaagtacattggatttgagacggtgaatggtgatatattcatctgtacccaaaaagcagccaggaatatgtcataccagggctttaccaaagacaatggcgtggtgcctgttgttaaggaattaatgggggaggaaattcttggtgcatcactttctgcacctttaacatcatacaaggtgatctatgttctcccaatgctaactattaaggaggataaaggcactggtgtggttacaagtgttccttccgactcccctgatgatattgctgccctcagagacttgaagaaaaagcaagccttacgagcaaaatatggaattagagatgacatggtcttgccatttgagccggtgccagtcattgaaatcccaggttttggaaatctttctgctgtaaccatttgtgatgagttgaaaattcagagccagaatgaccgggaaaaacttgcagaagcaaaggagaagatatatctaaaaggattttatgagggtatcatgttggtggatggatttaaaggacagaaggttcaagatgtaaagaagactattcagaaaaagatgattgacgctggagatgcacttatttacatggaaccagagaaacaagtgatgtccaggtcgtcagatgaatgtgttgtggctctgtgtgaccagtggtacttggattatggagaagagaattggaagaaacagacatctcagtgcttgaagaacctggaaacattctgtgaggagaccaggaggaattttgaagccaccttaggttggctacaagaacatgcttgctcaagaacttatggtctaggcactcacctgccttgggatgagcagtggctgattgaatcactttctgactccactatttacatggcattttacacagttgcacacctattgcaggggggtaacttgcatggacaggcagagtctccgctgggcattagaccgcaacagatgaccaaggaagtttgggattatgttttcttcaaggaggctccatttcctaagactcagattgcaaaggaaaaattagatcagttaaagcaggagtttgaattctggtatcctgttgatcttcgcgtctctggcaaggatcttgttccaaatcatctttcatattacctttataatcatgtggctatgtggccggaacaaagtgacaaatggcctacagctgtgagagcaaatggacatctcctcctgaactctgagaagatgtcaaaatccacaggcaacttcctcactttgacccaagctattgacaaattttcagcagatggaatgcgtttggctctggctgatgctggtgacactgtagaagatgccaactttgtggaagccatggcagatgcaggtattctccgtctgtacacctgggtagagtgggtgaaagaaatggttgccaactgggacagcctaagaagtggtcctgccagcactttcaatgatagagtttttgccagtgaattgaatgcaggaattataaaaacagatcaaaactatgaaaagatgatgtttaaagaagctttgaaaacagggttttttgagtttcaggccgcaaaagataagtaccgtgaattggctgtggaagggatgcacagagaacttgtgttccggtttattgaagttcagacacttctcctcgctccattctgtccacatttgtgtgagcacatctggacactcctgggaaagcctgactcaattatgaatgcttcatggcctgtggcaggtcctgttaatgaagttttaatacactcctcacagtatcttatggaagtaacacatgaccttagactacgactcaagaactatatgatgccagctaaagggaagaagactgacaaacaacccctgcagaagccctcacattgcaccatctatgtggcaaagaactatccaccttggcaacataccaccctgtctgttctacgtaaacactttgaggccaataacggaaaactgcctgacaacaaagtcattgctagtgaactaggcagtatgccagaactgaagaaatacatgaagaaagtcatgccatttgttgccatgattaaggaaaatctggagaagatggggcctcgtattctggatttgcaattagaatttgatgaaaaggctgtgcttatggagaatatagtctatctgactaattcgcttgagctagaacacatagaagtcaagtttgcctccgaagcagaagataaaatcagggaagactgctgtcctgggaaaccacttaatgtttttagaatagaacctggtgtgtccgtttctctggtgaatccccagccatccaatggccacttctcaaccaaaattgaaatcaggcaaggagataactgtgattccataatcaggcgtttaatgaaaatgaatcgaggaattaaagacctttccaaagtgaaactgatgagatttgatgatccactgttggggcctcgacgagttcctgtcctgggaaaggagtacaccgagaagacccccatttctgagcatgctgttttcaatgtggacctcatgagcaagaaaattcatctgactgagaatgggataagggtggatattggcgatacaataatctatctggttcattaaactcatgcacattggagatttatcctggtttcttaggaatactactactctgattgtgtctactgattggctatcagaaccttaggctggacctaaatagattgatttcatttctaaccatccaattctgcatgtattcataattctatcaagtcatctttgattcctggacctaataaattttttttccctttctttgggtgtccaagagaaatggtttttgccaaactctttttaaaaaacaaattgttgctatttcctagaagtttctggtttttaagatgaacataaaagtgtcagtatgcttcttttatgaggtgtactttatactttgatgaaggctaaggtgtacctaacagctttttatagtatattcatttatggagttagctgtatttttttttaaaaaagaaaagtagtaaattagcagcttttttttttaaatgaagagaacttcatgatgatttaaaagaactaatgagaatattttgacttgacttcaattactaagtattttgtataaagaacaaataggtcctgcattttataagactttttaaagctttaattattcaactaagaaccaataatggcttcttcaaggctaatatcaatagtttataagcagtatatttcacctacactaaatatgggcattttaaaagaagattccccccttcccccccagaaatctgcatttactaaatttgtcttaagtccaattgtgtttaaaggtcatgctggtcgggtgtggtggctcacacctataatcccagcactttgggaggccaaggtgggcagtcacctgaggtcaggagtttgagaccagcctgaccaacatggtgaaaccccgtctctactaaaaatacaaaaattagcttggcatggtggcgggtacctgtaatcccagctgcttgggagtgtgaggcaggagaatcgcttgaacctgggagaccgaggttgcagtgagctgaaaccgtgccattgcactccagcttaggcaacaagagtgaaactctgtctcaatcaatccatcaatcaatcaataaaatagaggtcatgctgactattacagatttaaaaaaaaaaaaaaaaaaaa

SEQ ID NO: 27 - DNA, 1934 bp, HOMO SAPIENS
cagaggcccgagcggacgcgaggcgacgcggagagggcggcctgggccgaagttgcgaggggcggtgttgaagaatgtgtgggcgaacatcctgtcacttacctagagatgttctcacgagagcttgcgcctaccaggatcggcggggccagcagcggctcccggagtggagggaccctgataagtactgcccctcttacaacaagagtcctcaatccaacagcccagtgcttctgtctcgactgcactttgagaaggatgcagactcatctgagcgtatcattgctcccatgcgctggggcttggtcccttcttggttcaaagaaagtgatccttccaagctgcagttcaatactaccaactgtcgtagtgataccgtaatggagaaacggtcatttaaggtgcctctgggaaagggaagacgctgtgtcgttttagcagatggattctatgagtggcagcgatgtcagggaacaaaccagaggcagccatacttcatctattttcctcaaatcaagacagagaagtcaggtagcattggtgctgcagatagtcctgagaactgggagaaagtctgggacaactggaggctgctgacaatggccgggatctttgactgctgggagcccccagagggaggagatgtcctgtattcctataccatcatcacagtggattcctgcaaaggcttgagtgacatccaccacaggcagatgcctgccatattagatggagaggaggcagtttctaaatggcttgactttggtgaagtctcaactcaggaagctctgaaattaatccacccaacagagaacatcaccttccatgcagtctcttctgtggtgaacaactcgcgaaacaacactcctgagtgtctggctcctgtcgacttggtggtcaaaaaggagctcagggcaagtggcagtagccagaggatgttgcagtggttggccacaaagtcacccaaaaaggaagactcaaaaacacctcaaaaggaagagtcagatgttccccagtggtccagtcagttcctgcagaagagtccactccccaccaagagaggcactgcaggactcctagagcaatggctgaagcgggagaaggaggaggaacctgtggccaagcgtccttacagccagtgacacaggactttcagagaccaaggccagggtctgctgcactgctgttctgataataggttcttaacattgtatgtatatgtgtttgctttgggaggaggtggcactgtgttagttgacagttgtgggctcatgtagtcttttttgccatgagtaggagcccctagtggggctggtggacagctttggaagagggctgccctttcctggcagggctggtggagtcttccctcaaagcatgccttacccagctgggaagtctctgccctgatctggtactccttgtagtaagctgttttctgctcagccactgggctctttcacttttttagttcttaaaaatttatttttaagttctaaaataaaataaaaataagttcttaaaatttatttttttcctgaataaattgtatttggtaaacttctgcctacattttggaaagtgatgctggtggggaaagttctagatcttacttggtttcttctagaatcagtcttcaggaatggattttgtcacaaatggggcatgggggctttctgaggaaataactacaagtcttggtggtgggctccttattatgtttctttttctttcattcttgatacttggaagtcgtctgaatcctttagcttcaaaccagcctgagtttgagtgcttgccgtagcagaaactatccttaccacaggtgggaaggaaaggaccagtttctagcagtgtcgggccactcctctttcgaacatccctaagggaggcattcacaaaagctgtcccaagcagctggaagaaaacagctt

SEQ ID NO: 28 - DNA, 586 bp, HOMO SAPIENS
gtaacggtcctcagcgcaagggtcatttcgtcgctgggaagggacggccctcgcccgcggtgatggtggttagcaagatgaacaaagatgcgcagatgagagcagcgattaaccaaaagttgatagaaactggagaaagagaacgcctcaaagagttgctgagagctaaattaattgaatgtggctggaaggatcagttgaaggcacactgtaaagaggtaattaaagaaaaaggactagaacacgttactgttgatgacttggtggctgaaatcactccaaaaggcagagccctggtacctgacagtgtaaagaaggagctcctacaaagaataagaacattccttgctcagcatgccagcctttaagattgaattagattgtgttgttgtggttttatttctgaaagtaaaacttgccataaattagaaaacaatttcccaaaataaaatccttttttgtatgatggtatacagttttcagtaatgatgtatacattgtattgatttttttccctaaatgtgttattttaataaatatctcatgaatgagtttgaagtttgcttggaaaaaaaaaaaaaaaaaa

SEQ ID NO: 29 - DNA, 1679 bp, HOMO SAPIENS
gcccgcctgatgtcgtcccacgccgtgccggctctcaggcgccggaagtgagctgcgcagcgccggaagcggcggacgcaggaggcctcgtggaggacacagcagcatgggacagtcagggaggtcccggcaccagaagcgcgcccgcgcccaggcgcagctccgcaacctcgaggcctatgccgcgaacccgcactcgttcgtgttcacgcgaggctgcacgggtcgcaacatccggcagctcagcctggacgtgcggcgggtcatggagccgctcactgccagccgtctgcaggttcgtaagaagaactcgctgaaggactgcgtggcagtggctgggcccctcggggtcacacactttctgatcctgagcaaaacagagaccaatgtctactttaagctgatgcgcctcccaggaggccccaccttgaccttccaggtcaagaagtactcgctggtgcgtgatgtggtctcctcactgcgccggcaccgcatgcacgagcagcagtttgcccacccacccctcctggtactcaacagctttggcccccatggtatgcatgtgaagctcatggccaccatgttccagaacctgttcccctccatcaacgtgcacaaggtgaacctgaacaccatcaagcgctgcctcctcatcgactacaaccccgactcccaggagctggacttccgccactatagcatcaaagttgttcctgtgggcgcgagtcgcgggatgaagaagctgctccaggagaagttccccaacatgagccgcctgcaggacatcagcgagctgctggccacgggcgcggggctgtcggagagcgaggcagagcctgacggcgaccacaacatcacagagctgcctcaggctgtcgctggccgtggcaacatgcgggcccagcagagtgcagtgcggctcaccgagatcggcccgcggatgacactgcagctcatcaaggtccaggagggcgtcggggagggcaaagtgatgttccacagttttgtgagcaagacggaggaggagctgcaggccatcctggaagccaaggagaagaagctgcggctgaaggcgcagaggcaggcccagcaggcccagaatgtgcagcgcaagcaggagcagcgggaggcccacagaaagaagagcctggagggcatgaagaaggcacgggtcgggggtagtgatgaagaggcctctgggatcccttcaaggacggcgagcctggagttgggtgaggacgatgatgaacaggaagatgatgacatcgagtatttctgccaggcggtgggcgaggcgcccagtgaggacctgttccccgaggccaagcagaaacggcttgccaagtctccagggcggaagcggaagcggtgggaaatggatcgaggcaggggtcgcctttgtgaccagaagtttcccaagaccaaggacaagtcccagggagcccaggccaggcgggggcccagaggggcttcccgggatggtgggcgaggccggggccggggccgcccagggaagagagtggcctgagcccaagccgcaccggagcagcggctggattgaacgccccagattggggcccgagatgtggccctcggtttcctttcataaaggagttgtgtccccagcccttccactccagtaaagaactgaattggccagggaaaaaaaaaaaaaaaaa

SEQ ID NO: 30 - DNA, 1482 bp, HOMO SAPIENS
gcttctggtacttttgacgcgtctgctaacgtagtccctcagtgcgcatccggacgtaggaggtggaggttgtggaattcgccgttcgaaagcagggactaaaagccccacttcgtcttacgttccgaaaggaaggcgtctgttgagcctttctctcagtcgtgagggaggcgtcgacggcgtgcggaagtcctgagttgaggcttgcgggatcctttccggagaaagcgcaggctaaagccgcaggtgaagatgtccaactacgtgaacgacatgtggccgggctcgccgcaggagaaggattcgccctcgacctcgcggtcgggcgggtccagccggctgtcgtcgcggtctaggagccgctctttttccagaagctctcggtcccattcccgcgtctcgagccggttttcgtccaggagtcggaggagcaagtccaggtcccgttcccgaaggcgccaccagcggaagtacaggcgctactcgcggtcatactcgcggagccggtcgcgatcccgcagccgccgttaccgagagaggcgctacgggttcaccaggagatactaccggtctccttcgcggtaccggtcccggtcccgtagcaggtcgcgctctcggggaaggtcgtactgcggaagggcgtacgcgatcgcgcggggacagcgctactacggctttggtcgcacagtgtacccggaggagcacagcagatggagggacagatccaggacgaggtcgcggagcagaaccccctttcgcttaagtgaaaaagatcgaatggagctgttagaaatagcaaaaaccaatgcagcgaaagctctaggaacaaccaacattgacttgccagctagtctcagaactgttccttcagccaaagaaacaagccgtggaataggtgtatcaagtaatggtgcaaagcctgaactgtcggaaaaggtaacagaagatggaactcgaaatcccaatgaaaaacctacccagcaaagaagcatagcttttagctctaataattctgtagcaaagccaatacaaaaatcagctaaagctgccacagaagaggcatcttcaagatcaccaaaaatagatcagaaaaaaagtccatatggactgtggatacctatctaaaagaagaaaactgatggctaagtttgcatgaaaactgcactttattgcaagttagtgtttctagcattatcccatccctttgagccattcaggggtacttgtgcatttaaaaaccaacacaaaaagatgtaaatacttaacactcaaatattaacattttaggtttctcttgcagatatgagagatagcacagatggaccaaaggttatgcacaggtgggagtcttttgtatatagttgtaaatattgtcttggttatgtaaaaatgaaattttttagacacagtaattgaactgtattcctgttttgtatatttaataaatttcttgttttcattcttaaaaaaaaaaaaaaaaaa

SEQ ID NO: 31 - DNA, 8564 bp, HOMO SAPIENS
cttccggctgggcaaggggccgcggggagcagctcgggactgaaccgagaggtgccgaaggaaccggcgggccgcttgatcccgctgcagacgtaggagatgcctgggacaaggaggccaccttctcagggcaaaagaaaaagaaggtgacaggcgttgagaccaccgaagggaacccatggctaggatcagtttttcctacctctgcccagcctcctggtacttcactgtgcccacagtgagtccatttctccgtcagcgggtggcattcctgggactcttcttcatatcctgtctccttttacttatgttaatcatagactttcgacattggagtgcttcattaccacgagataggcaatacgaaaggtatttggctcgagtaggggagcttgaagctactgacactgaagacccaaatctgaattatggacttgttgttgactgtggcagcagtggttcccggatttttgtttatttctggccaagacataatgggaacccccatgacttgctggacatcaaacagatgagagaccgcaacagccaaccagtggttaaaaaaatcaagccaggaatctctgcaatggcagacactccagaacatgccagtgattaccttcgtcctctgctgagctttgctgctgctcatgtgcctgtgaagaagcacaaggagacccctctttacatcctctgcacagcaggcatgaggcttctccctgagaggaagcagttggctatcttggctgacctagtgaaagatttaccactggagtttgacttcctcttttcacagtctcaagcagaagtgatctctgggaagcaggaaggggtttatgcatggattggaatcaactttgttttgggaagattcgaccacgaggatgaatcagatgctgaggctacccaggaattggcagcaggacggagaaggacagtagggatactggatatgggaggagcctctctccaaattgcttatgaagttcctacctcaacctctgtccttcctgcaaagcaggaagaagctgccaagatcctgctggctgagttcaacctgggctgtgatgtgcaacacactgaacacgtgtacagggtttatgtcacaacttttctgggtttcggaggcaactttgcccggcagcgctacgaagaccttgttctgaatgaaactcttaacaaaaacagattgcttggtcagaagacaggtctgagtcccgacaatccatttctggatccctgcctgccagtgggactcacagatgtggtggagaggaacagccaagtcttacatgtccgaggaagaggagactgggtgtcttgtggggcaatgctgagccccctgctggctcgctccaacaccagccaggcctcactcaatggcatatatcaatcgcctattgacttcaacaacagcgagttctacggcttctctgagtttttttattgtacagaggatgtgttgcgcattggtggccgctaccatgggccaacatttgccaaggctgctcaggattactgtggcatggcttggtcggtactaactcagagattcaagaatggcctcttttcatcacatgcagatgagcatcgactcaaatatcagtgttttaaatcggcttggatgtaccaagtcttacatgaaggattccactttccctatgactacccaaacctgcggacagcccagctggtgtatgaccgagaggttcagtggacgctgggagccattctatataaaacacgattcttaccactcagggatcttcggcaggaaggtgtccgacaagcccatggtagctggttccgtctctcctttgtatacaaccactatctcttctttgcctgtatcctggtggtgctactggccatcttcctataccttctgcggctacgccgaattcaccaccgacaaacacgagcctcagctccattggacttgctgtggcttgaagaggtggtgcccatgatgggagtacaggtggggccgtgaggctggaccaggactagagaagcttgagcacccccgagttgctgctcattgaattcctccactttcttatatagcctcagatgctgtgatgtctgaccttgtggatatttgcccttggaatttctactttactttctaccgtaattccttctccgtacccaggtcttctctgagagaagctataatttaatctgtgaggaactaaatgacaggagattggtgctaatacgggggaccaagctttgtccaagtgaagcaggcttcgactccttctgagaggtctggtgtgttcctagaatctcaccttttcttcccttgctaaagcatgaagtttggcatttggcacactggaagcctggttgaaatgaaatttgtagcatctgatacaaagccagagacattctagcaagtgcagcagccccttctttctctgtaacagagatatcatttatgtggagatccacaacctttaacagggatccaagatctttgcagttcaatcgaccacataggaatttccaggcaccaaaatgatataacttccttgcttccttgacaaagaagccatcatgggtgtgatccaagatccctgtcgtagtgttgatgatgttagtacatgattttaaaggttagaaccccttctaaatgaatggtctgtggaagattttagtatcttatctgatgcctggtatgatgaggatagaaaatttttccatttttatgtgcctcacaggctgtttgggcattaattttgctttttgagccttaagtgtgttagtaggatggagaaactgtgatggggactgggaacctggatttgtctgattttaggtcactgttccctgggcctgtttttgtgagcccttacacaggaagatataaagagagttctttcatttcactgctaaaatcagtatgtagtatggggaatgtatttgggttgtttttaaagaaaaggggaacagaatcaggagagtgggcaaaggcaataaaatcaaagttcttattaattatttctgagaaatagaagtttctcaatttatgactcttggaatgtctgaaagggagcaaatttggaatagatcaatctgttaataagccatctggcaactttcagaacctctattaagagactgctgagtcacaaacagcacttccattaatgaagcgagaggaaaagccataataattacatcttcacccactacccttccagagctttgcttctcctccacatttagccattaaattgcatgaggatttctcttcatcagggtccgcatggaatctttcttatattttaccctttcctacatgtagccttgaatgtcctttccacgaatatgctcccacggctgggagcattttcttttcttttcgtcacctttgatttttgggattagattaataggggaaaaagtccctggctttaaagaaaacaaaagtagaattcttcaaaaataaatttcatactgggaacagaaaggaactaaatgcttcataaaacagggaaaaagaaattaagatcatcctagaaataaactaagataaaaataagtatactgacccttggttggtagataaaaagatgaccagtcttgtattgttttaaaattagataaacatggattaagcatgcaaagactctgttcctttttttttttcttggagacagggcctcacgctgtcacccaggctggagtgcagttgtgcaacatcatggctcaccgcagcctcaacctcctgggctcaaacagtcctcccaactcagactccagagtagctgggactacaggtgtgcgccaccacactcagctaattttttattttatttttttagagatggagtctgtgttgtccaggctggtctcaaactcttgggctcaagcaatcctcccacctcagcctcccaaagtgctgggattacaagcatgagctactgcacctgccctctgtttcctttggaaatctcttacctttcattagggtttctttcatagcaatttcctttggtttttaagacttctacattgctttttcttttattatctgtgctccgtgaaccttatgaatgctgcttaaaaataatgtcaaaatatgttttagctgcctactcaggtaacgttttcttttgctctcatcttggtttccatatactatttttggttttttgtgagatctaatcaatgatctagtcagaagctacttcactggctaacagtgatcatgttcatgtgctaaaaatgaacttgaaacacggaagtagtggttggtccagtttgaaagctcttattagtattcttcatcctggctgtaataatagccattatttgttatgcctttgttatgtagcagacactcttaaggattttatgtgtattattcaaattgctattactgttctttttatagttgagaatctcaggatacctacatttatcactttttcaatatatatgtatttcttattcttattttgtcttggagtgtttaatgtgttatttcctgttcattactttaatattatggtatctaggcttgtctttattaccatgagcaaggtctccaggagttccacagtactgaaggaaaattttgtcatatccctcagaagaactgaatatttattattggtatgggctcctttgtttattctcttctcccaattaatagattttaaatgaaatcttattagctagaaacaaaagccacttactccttgctgagagccaattacttaaatatatttcttccttataataaaataatttgcttctaggagcagaaatctatcttgccataccctttggtttttaaagatttctcttctatttgcatttctgcactttggtggttctcccatgaagataattatggtgtcataaaattcacattccactggttcctttgaatcttaccaaccactcttgttaacagagacaatgaacctgaactgttttaggactcttgttattactgagacaggtcacaaacatcaaaataggagtccgtggcttgtagtgatgctttttagtcttgtgatagcacaatccatcactttccccaaaattcttgtcatagaacataatgaaaaatatgtaaaatacccatttatgtggcatttcattcacttaagttgcagttaactctaagccaaattataccattttttctctctgtactttagctccttgaatttccttaatctgggaaacttttgttcccacaccaaggaacaaattcagggggtacaagtgcaggtttgttacatgagtatattgagtgatgctgaggtttggggtacagatcccatcaccaggtggtgagcatagtacctaacagatagttctttaatccatgccctcctctctccctccctgctctagtagtccacagtgtctattctggtctgggaaattttcatcactttccaccaatcttctatttattctccaaatgtcttccaaagtatcctgccccaccccctcctcatcctaagagattcctttaacttcaagatcatatccagtgattgctgaaaaatgtctgccatgcacttgctaagctagtgtttttaggcattaacatttattatcacatccatatttatatttttgaaataatttatacttctcactgatatcatctaaacagatgcttctcacagttttatgttttgttttttgtcagggatgaaagacaagtgagtggtatcacttaagggaaagaacagtaggcttaacgaatagcagacctggattctagttctggctttgtcatttactagctctggtaccccaggccagtcacttaccatctctggttcggttctcatctatcaaacaaagaggctagacaagattagaaactaaaggcagaagacaaggtagaaaaatcatatgattttgggaagagcattttgtcctttggtttagaagaccaggctgcccaaaagagcctcctattttatccataacccctgatgataaggttggtgggaacagagtttctaatagtaatcataataaatttcagaagagttttaaagcttctggtcaacccccttgatttatatgggtgataaaactgaggcctagagcagttgtaatatgtgcaaagtcatagtgactggcctcctagcccaactactttgtcagctacaatgaaatgctcattaacagaatctttctgcaagtataaacagaatctattttttataaaacagctggccacaactaaccatgccccatctttacaactgcttctgacattcatttatgactgctttgctcacatttaggaataaactttgaaaaaaatactttgtcagaaatagtgccaagttttcactacatctattcttgttcctgtatttcttttcgtacttttaaattttatacatctttttaaaacaattttatacaatttcctttactacaacatccaagcaattcattagatgactacagcctagatgaaggtataaatgcctattacatctacctcattaaagaacttcgttgtaattcttgggcagtttccagactctgttacagaaacagagggctgtttctttttgttgtctttaaacttttcaaattaattcaaaactagtatctaattgtcctttttgctgtggtatgtggtgtaatgttgattgggaataagaattatggtagaaatagcagatgtttcaaattctcccatattagtctcttagggacgctagctccagattccagcccctggggcaataacttgtgaggattttcctggtgttacaaaaaatattgctgttaaaaaactaagactcaaaaccaaaagttgtgattaataataacaggattattagtcaataatattttgattaatactatagaatagcaacagtgaatatacctcaaattgaaaacttttaggttgtgttcttggctcattctctcataacctggatctaagttggaaagctgtggcaccctgtttgggtgtcccatctaccctgttttctgtttctgcagatggcttgttcaagcttcattttaagcctgctctgtctacttatcttccttatatcctaatagacttctcttgtgttattacacatttctcttttgctctaatatttcattattttccagtttgtcagtaccgttatcagagggacgaggaaggaataacacaccagttgaccattttgtttctctgaaaatctgagcaatacggagatccttttattagtaaaactgaatcattactcatactacaagggctttcacttttaaaatgtaatccatcattgcttgccatttttatgaaaaccaaagttgaaaagtcttctgaatcacaggctatgtatagccacacatgcatgacttcaggctagcataaagacatgtctgctcctgagcctcttcttttaaagggcaaccacttgtataccctctggtggccactcctccttctccactccaaggcagccctggtactttcctaagtggcccctcctacagagcacttgccggcatttggcctgctgctggtgaagacgccccttactagcttcataaatgtttttctgcaagcagggatcccagacacatactttggtttctagtgtttcagttactatgttgtatttgaaattctcattccacaattaccctttagttgaagtcctgaagtacatgccatgtactccccctttatttctaccttgatcaatggcctctgcggagtgtagtgaaagacatctttttattatgatctacactttaaaaaaccaaaggctgcctgtattacattgctttggggagttgttaagactctgttttttctactgcttcacattaaacaataattttgttgaattttgaattcttaaaattctcactgacaaacattttaggtcagtgttgaggaaaatgtgtgatgcatgttagagaggtgatgcattctcccttatgcagggacatgggtatatgtgttacatatgctgatatataacccaccattcatcccaggaccacaagggtagctgtagataaactggttatcctaaaatcatgattatcagtgttgatctctgcaaccaacattgctttagggagttgctagtcattacccctgctacaatagatagtatttgtcagtctaagttacagacaaaaaattctaggttgactgattaagaaagccatgtgttttaatttccttcatgttttaaaaacaatggacgtaagtgcagagagacctttgaaaatattaagggaaatctatttaatcctataggtatgtgatgacttgtttttttggaaaaaggtatttggaacatcaatctgtaattatccattttccattcatgcattcactaattcaatatttgatatgtgtctgggagtgctgggaataacataaatacaaaaaaaaccctaagataatcattcaccagaagctcatagatataatacagttatatagctaaatgcaaccagttgtttttccaaatgtactcatcatctgtaataaaagaaaaatgaagtaaaacatctgaaaccttaacttaaaaaaaaaa

SEQ ID NO: 32 - DNA, 2545 bp, HOMO SAPIENS
ctttttgatcgtttcccatgtgttgtcagatagctccatagaattcagtttctgagaaccagccagaagcatgcagtgacattgcacaatctgcctctgaagctggagatactagctgcagagctcaggggagctgctccacatcaccgacatgaagggaacaggcatcatggactgtgcgcccaaggcactcctggccagggcactttatgacaactgccctgactgctctgacgagctggctttcagcagaggggacatcctgaccattctggagcaacacgtgccagaaagcgagggttggtggaagtgtttgctccatgggaggcaaggcctggcccctgccaaccgcctccaaatcctcacggaggtcgctgcagacaggccgtgccccccattcctgagaggcctggaagaagctcctgccagctcagaggagacctatcaggtgcccactctaccccgccctcccactccaggccccgtttatgagcagatgaggagttgggcggaggggccccagccccctactgcccaagtctatgaattccccgaccctcccaccagtgccagaatcatctgtgaaaagactctcagctttccaaaacaggccatcctcacgcttcccagacctgtccgggcctcactgccgactctgccttcccaggtgtatgacgtgcctacccagcaccggggccccgtggtcctgaaggagccagagaagcagcagttatatgacataccagccagccccaagaaggcaggactccatcccccagacagccaagcaagtgggcagggtgttcccctgatatcagtgactaccttaagaagaggcggttacagcacattaccaaatcctcagaaatcggaatggatttatgacactccagtgtctccaggaaaggccagcgtcagaaacacgcctctcaccagctttgcggaagaatcaaggccccacgctctccccagttccagctccactttctacaatcctccaagtggcagatccaggtccctcactccacaactgaataacaatgtgcccatgcagaaaaaactcagccttccagaaattccttcttatggctttcttgtacccagaggcacatttcctttggatgaagatgtcagctacaaggttccttcaagctttctgattccccgagtggaacagcagaacaccaagcccaatatttatgacatccctaaagcaacgtcgagtgtttctcaggctgggaaggagctggagaaagccaaggaggtgtcagagaattccgcgggccataattcctcatggttctccagacggacaacttccccatctcctgaaccggacagattatcaggttccagttctgacagcagagctagcatcgtttcctcgtgctccaccacatccaccgacgactcctccagctcttcctcggaggagtcagcaaaggagctctccttggacctggatgtggccaaggagacagtgatggctctgcagcacaaggtggtcagctctgtcgctggcctgatgctctttgtcagcaggaagtggagattccgagactatctggaggccaacattgatgcaatccacaggtccactgatcacatagaagaatctgtaagagaatttctggattttgcccgaggagtccatgggactgcctgtaacctcactgacagtaaccttcagaacagaattcgggaccagatgcagaccatctccaactcctaccgcatcctgcttgaaacaaaggaaagcttggataatcgcaattggcctctggaagttcttgtgactgacagtgtccagaacagcccagatgaccttgagaggtttgtcatggtggcacggatgcttccagaagacatcaagaggtttgcctccattgtcattgccaatggaaggctcctttttaagcggaactgtgaaaaggaagagactgtgcagttgaccccaaatgcagaatttaagtgtgaaaaatacatccagcctccccaaagagaaactgaatcacaccaaaagagtaccccttccactaagcaaagggaagatgaacactcttctgaactattaaagaaaaatagggcaaatatctgtggacagaatcctggccctcttatacctcagccttcgagtcaacagactcctgagaggaaaccccgcttatctgaacactgccggctgtactttggggcgctcttcaaagccatcagcgcatttcacggcagcctcagcagcagccagcccgcggagatcatcactcagagcaagctggtcatcatggtgggacagaagctggtggacacgctgtgcatggagacccaggagagggacgtgcgcaatgagatcctccgcggcagcagtcacctctgcagcctgctcaaggacgtagcgctggccactaagaatgccgtgctcacataccccagccctgccgcgctggggcacctccaggcggaggctgagaagctggagcaacacacgcggcagttcagagggacactgggatgaggactgtctacctcccttcctcctctgctcacc

SEQ ID NO: 33 - DNA, 1641 bp, HOMO SAPIENS
gctttttacgacgcggcaggcgcggcgcgcttagttgccggagctgaacggcgcggagctggtctgaggcgagccgagccgagcgagcgcggcggtggggccgagaggacgcgcaggtggcggcgttgccatgtcgcacggtcacagccacggcgggggtggctgccgctgcgccgccgaacgggaggagccgcccgagcagcgcggcctggcctacggcctgtacctgcgcatcgacctggagcggctgcaatgccttaacgagagccgcgagggcagcggccgcggcgtcttcaagccgtgggaggagcggaccgaccgctccaagtttgttgaaagtgatgcagatgaagagcttctgtttaatattccatttacgggcaatgtcaagctcaaaggcatcattataatgggagaggatgatgactcacacccctctgagatgagactgtacaagaatattccacagatgtcctttgatgatacagaaagggagccagatcagacctttagtctgaaccgggatcttacaggagaattagagtatgctacaaaaatttctcgtttttcaaatgtctatcatctctcaattcatatttcaaaaaacttcggagcagatacgacaaaggtcttttatattggcctgagaggagagtggactgagcttcgccgacacgaggtgaccatctgcaattacgaagcatctgccaacccagcagaccatagggtccatcaggttaccccacagacacactttatttcctaagggctggccaaggctcccatagaggcgctgtgtcagtgaagatgtacgactacctgttgggaaggacaaagggatgaggctccagagagagttggctgccacagcctctgccaagctttgtctttggggcttgctgcagaaacctggcctacggaagatacgacaccactgggagggttgtgtaggtgccaggggaccatcgtggttctctagggcgctgtggaaattgggtcttgggctgggtggcatctggcagtcatgggtaacacttgcttttccagttaatgtggccatgtgattccaagtgtcatgttgctttgtggcaagattgttgtgtgacttgtttttttgtttttgtttttgtttttttaaaggaaactatttgtgggctataggaaactttctgatgcctccggattgtgttagtagtagccatcaggagggtctccaactaaaacacttgttcctgcttgctcctttcccctctcattgttcagcattcttgtcaagttgcccagcttggagttgtctgtcacgcacatgtgtcctgtggttatagctagaaggacaggagtctcctgctgatgcgtgatagcttaagcttggggagaaggtcttttccactgcctagctaagcagtctggggagagcatggggatcatttctatgtgtgtgggtaatctggtcagtaagattgagacttagttaagattccccttggaaattccttaatgtttattagcttctaactagtgttgtaagtccgatgccagaatttggagatttgagttcttcttttcatggcttttattcactgtgactaataagcttcctaataaatccttgccagacttaaaaaaaaaaaaaaaaaaaaa

SEQ ID NO: 34 - DNA, 3375 bp, HOMO SAPIENS
gcggggcgctgcagcccgcggagcctcccgcccgcccgggctggggtcgcgctggctcggactccgctccccgccccgccgcggccatggaggacgagcggaaaaacggagcctacggaacgccacagaagtatgatcccactttcaaaggacccatttacaataggggctgcacggatatcatatgctgtgtgttcctgctcctggccattgtgggctacgtggctgtaggcatcatagcctggactcatggagaccctcgaaaggtgatctaccccactgacagccggggcgagttctgcgggcagaagggcacaaaaaacgagaacaaaccctatctgttttatttcaacattgtgaaatgtgccagccccctggttctgctggaattccaatgtcccactccccagatctgcgtggaaaaatgccccgaccgctacctcacgtacctgaatgctcgcagctcccgggactttgagtactataagcagttctgtgttcctggcttcaagaacaataaaggagtggctgaggtgcttcaagatggtgactgccctgctgtcctcatccccagcaaacccttggcccggagatgcttccccgctatccacgcctacaagggtgtcctgatggtgggcaatgagacgacctatgaggatgggcatggctcccggaaaaacatcacagacctggtggagggcgccaagaaagccaatggagtcctagaggcgcggcaactcgccatgcgcatatttgaagattacaccgtctcttggtactggattatcataggcctggtcattgccatggcgatgagcctcctgttcatcatcctgcttcgcttcctggctggtattatggtctgggtgatgatcatcatggtgattctggtgctgggctacggaatatttcactgctacatggagtactcccgactgcgtggtgaggccggctctgatgtctctttggtggacctcggctttcagacggatttccgggtgtacctgcacttacggcagacctggttggcctttatgatcattctgagtatccttgaagtcattatcatcttgctgctcatctttctccggaagagaattctcatcgcgattgcactcatcaaagaagccagcagggctgtgggatacgtcatgtgctccttgctctacccactggtcaccttcttcttgctgtgcctctgcatcgcctactgggccagcactgctgtcttcctgtccacttccaacgaagcggtctataagatctttgatgacagcccctgcccatttactgcgaaaacctgcaacccagagaccttcccctcctccaatgagtcccgccaatgccccaatgcccgttgccagttcgccttctacggtggtgagtcgggctaccaccgggccctgctgggcctgcagatcttcaatgccttcatgttcttctggttggccaacttcgtgctggcgctgggccaggtcacgctggccggggcctttgcctcctactactgggccctgcgcaagccggacgacctgccggccttcccgctcttctctgcctttggccgggcgctcaggtaccacacaggctccctggcctttggcgcgctcatcctggccattgtgcagatcatccgtgtgatactcgagtacctggatcagcggctgaaagctgcagagaacaagtttgccaagtgcctcatgacctgtctcaaatgctgcttctggtgcctggagaagttcatcaaattccttaataggaatgcctacatcatgattgccatctacggcaccaatttctgcacctcggccaggaatgccttcttcctgctcatgagaaacatcatcagagtggctgtcctggataaagttactgacttcctcttcctgttgggcaaacttctgatcgttggtagtgtggggatcctggctttcttcttcttcacccaccgtatcaggatcgtgcaggatacagcaccacccctcaattattactgggttcctatactgacggtgatcgttggctcctacttgattgcacacggtttcttcagcgtctatggcatgtgtgtggacacgctgttcctctgcttcttggaggacctggagaggaatgacggctcggccgagaggccttacttcatgtcttccaccctcaagaaactcttgaacaagaccaacaagaaggcagcggagtcctgaaggccccgtgctccccacctctcaaggagtctcatgccgcagggtgctcagtagctgggtctgttcccccagccccttgggctcacctgaagtcctatcactgccgctctgcccctccccatgagccagatcccaccagtttctggacgtggagagtctggggcatctccttcttatgccaaggggcgcttggagttttcatggctgcccctccagactgcgagaaacaagtaaaaacccattggggcctcttgatgtctgggatggcacgtggcccgacctccacaagctccctcatgcttcctgtcccccgcttacacgacaacgggccagaccacaggaaggacggtgtttgtgtctgagggagctgctggccacagtgaacacccacgtttattcctgcctgctccggccaggactgaaccccttctccacacctgaacagttggctcaagggccaccagaagcatttctttattattattattttttaacctggacatgcattaaagggtctattagctttctttccgtctgtctcaacagctgagatggggccgccaaggagtgccttccttttgctccctcctagctgggagtgacgggtgggagtgtgtgtgcccaggtgggggtgtctcctggctgggaaggagggaaagggagggagagttttgcgggggttggcagtggagagcaggctggagaggagatggctaatagctgtttaatggaaacctgctgggctggagggagttaggctgaatttcccgacttcctctgccagttattgacacagctctctttgtaagagaggaaagaaactaaacccacccaagggatgatgtcagggggagaggtggagggcagatgtcctgggcaaaccgggcccctctgcccacacacctcacttgatccttttgccaaacttgtcaaactcaggggaactggcttcccagttgcccctttgccatattccaagtccccctcagacttcatgtctctgctcatcagcactgtcccaggatcctggagagggagaactcctggccccaggggaaagaggggggggtctcccgtttcctgtgcctgcaccagccctgcccccattgcgtctgcacacccctgcgtgtaactgcattccaaccactaataaagtgcctattgtacaggtcca

SEQ ID NO: 35 - DNA, 2413 bp, HOMO SAPIENS
acctctgtaggcgatcctgctctcgccgtggctttcgggtgctaggagacagttgccggcgttgggttgtgcgagacgctaactgtaccctccgggtttaacgctgtgaggcagcgcgcggaggaactggggataagcgccccggagcccccaaacagagcgcggccgctgggggacagcgcgcggcgccgggtcggggcggggcggcttttctgtcggaggacgcgaaccggcacgctgcgcctttaaggagtccagctgggctgggcgccggagctgggagcggcgcgggtaggagcccggcggcaggtcccagcccggggctagagaccgagggccggggtccgggcccggcggcgggacccaggcggttgaggctggtcaggagtcagccagcctgaaagagcaggatggatcttgatgtggttaacatgtttgtgattgcgggcggcacgctggccatcccaatcctggcatttgtggcttcatttcttctgtggccttcagcactgataagaatctattattggtactggcggaggacattgggcatgcaagtccgctatgttcaccatgaagactatcagttctgttattccttccggggcaggcctgggcacaaaccctccatcctcatgctccacggattctctgcccacaaggatatgtggctcagtgtggtcaagttccttccaaagaacctgcacttggtctgcgtggacatgccaggacatgagggcaccacccgctcctccctggatgacctgtccatagatgggcaagttaagaggatacaccagtttgtagaatgcctgaagctgaacaaaaaacctttccacctggtaggcacctccatgggtggccaggtggctggggtgtatgctgcttactacccatcggatgtctccagcctgtgtctcgtgtgtcctgctggcctgcagtactcaactgacaatcaatttgtacaacggctcaaagaactgcagggctctgccgccgtggagaagattcccttgatcccgtctaccccagaagagatgagtgaaatgcttcagctctgctcctatgtccgcttcaaggtgccccagcagatcctgcaaggccttgtcgatgtccgcatccctcataacaacttctaccgaaagttgtttttggaaatcgtcagtgagaagtccagatactctctccatcagaacatggacaagatcaaggttccgacgcagatcatctgggggaaacaagaccaggtgctggatgtgtctggggcagacatgttggccaagtcaattgccaactgccaggtggagcttctggaaaactgtgggcactcagtagtgatggaaagacccaggaagacagccaagctcataatcgactttttagcttctgtgcacaacacagacaacaacaagaagctggactgaggccccgactgcagcctgcattctgcacacagcatctgctcccatcccccaagtctgacgcagccaccactctcagggatcctgccccaaatgcggtcggagcgccagtgaccctgaggaagcccgtcccttatccctggtatccacggttccccagagctttggggaccacgcgaaaacctccaagatatttttcacaaaatagaaactcatatggaacaaaataagaaaccccagccatgaaatctaccatgaagtcttcaagttcatgtcactgagaagcttgtgcaaagcagccaccttggaccataattaaatcaaggacattttctttgagacattccttatagttggagactcaagatatttttgttgcatcaggtgtattcccttgcatgggcagtggcttttataggagcattagtcctcattcgctgaaccctgttgtttaggtctaatttaagttttacatagagacccatgtatgactgcagcccattggctgcaagaccagggaggaaagtggcaagctgtagaaaatgtttacacgcatggaggggcattgctctagccctcagagcgtccggagcagcagggtacatgggtgggaggttcattcagcacccaccagtcaggtatgttctgagtgaacccacagcagtcgcagaatgagcacctggcagggtgggtttcctaggaataatttattatttttaaaaataggcctaataaagcaataatgttctagacatctgtctaagtaatcagactcaggttccacacacaagcaacaactcgtgggcctcttttctatttcaatgtgctactaagaacccttggatgtaacatactagttagttaatgaattctgtgaattctgtgaagagtaatgtgattgaaaataagtctaaacagctgtaaaagtgaccacaatgacatgaaataaatttaataagtctagatcagcaaaaaaaaaaaaaaaaaaaaaa

SEQ ID NO: 36 - DNA, 2808 bp, HOMO SAPIENS
gggaaagaccagcagagaggaaagagaaactgggagagggaggaagggagaaagtgagaagggaaatcggaaagagaaaagggaggaaacggcagagccagagagaaagaggaagagactgagtgtgaaggagagaggacacaggggatgactgagagacagagagagagagagagagagaatgagacagagacttaaggaagagaccctgtgagtctgacaataaaagatttggacagaaacagaaagattggagagagagagagagggagagaatgagtgagagagagactggaagagacagagatcagagggagacacagaaagtgagagtggggagagaggtagtgtaaaaggaagagagagagagagagaccgtaagagacaggagacaaagagacaaaaagtgtgagtgagcaggtgaggagagagattgagaactatgagagacagcagctaagagacaaaggaggcgggagactgcctaggtgccgcagcacccacaccgtcctcttgcccccccgtcactgggaccccagagctggcccttgatggaggggagccgacctcgcagcagcctgagcctggccagcagcgcctccaccatctcctcgctcagcagcctgagccccaagaagcccacccgggcagtaaacaagatccacgcctttgggaagagaggcaatgcgctcaggagggatcccaaccttcccgtgcacatccgaggctggcttcataagcaggacagctcggggctccgtctctggaaacgccgctggttcgtcctctccggccattgcctcttttattacaaggacagccgcgaggagagtgtcctaggcagcgtcctgctccccagctacaatattagaccagatgggccgggagccccccgagggcggcgcttcaccttcaccgcagagcacccgggcatgaggacctacgttttggccgctgacaccttagaagacctgcggggctggctacgggcgctgggccgggcctcccgtgcggagggggacgactatgggcaacccaggtcacctgcacgaccccagcccggggagggccccggcggccccggtggtcccccggaggtgagcagaggggaagaggggcgcatctcagaatcaccggaagtgactcgactctccagaggtcgtggtagacccaggctgctcactcccagccccacaaccgacctccactctggactccagatgcggagggcgaggagccccgacctgttcacccccctctctcgccctccctcgcctctgagcctcccccgtccccgttctgcccctgcgcggcgaccccctgccccctcaggagacacagcaccccctgcccgacctcacaccccgttgagtcgcattgatgtccgacctcctctggattggggcccccaacgccagaccctctcccgaccccctactccccgccgaggacctccctctgaggctgggggaggaaagccccccaggagtccccagcactggagtcaggagcccagaacacagccgggtcctcccctggagtcaactttccaccaaagcttggagacagatacgctgctgaccaagttgtgcgggcaggaccggcttctgcggaggctgcaggaggagatagaccagaagcaggaggagaaggagcaactagaagcagctctggagttgacccggcaacagctgggccaagccaccagggaggctggggctcccgggagggcctggggtcgccagcgcctcttgcaggaccggctggtcagtgtgagggccaccctctgtcacttgactcaggagcgagagagggtttgggacacgtacagtggcctggagcaggagctgggcaccttaagagagacgctggagtacctgctgcaccttggttctccccaggacagagtgtctgctcagcagcagctgtggatggtggaagacacgctggcaggtctgggtggcccccagaaaccgcccccacacactgagcctgactccccatctcccgtgctccagggcgaggagtcctcagagagggagagcctgccagagtccttggaactgagctcccctaggtcccccgagactgactgggggcggcctcctggaggcgacaaagacctcgccagccctcacttaggtcttgggtctccgagggtctcccgggcttccagccctgagggtcgccacctcccttccccacagctaggaaccaagtccaaggaacaccaccccttacttgccgacttccgaaggtcaccgggagcgggttctcagcctctcccaagccctggctactgaggcgtcgcagtggcacagaatgatgacaggtggaaatttggactcccagggagaccctcttcccggtgtgccgctgcctccttcggaccccacgcgccaggagacccctccccccagatctcccccggtggctaattcgggttccacggggttctctcgccgagggagtgggcgtggaggaggtcccaccccctgggggcccgcgtgggatgccgggatcgcccctccggtcctgccacaagacgagggggcatggcctctgcgagtcactctgctacaatccagcttctaatccgcccaaaagcggcagccaatcggagcgcgaggacgtggtctggaggtaccgccggagatctgggaccactcagggcatcagggggcgtggtctggtccccattgcgggcccgggaggggaatggtttctatggccaaagtttggttttctcaacactgtctaaatttggattaaaactttgaacttttaaaaaaaaaaaaaaaaaaaaaa

SEQ ID NO: 37 - DNA, 3127 bp, HOMO SAPIENS
ggttgcccatgcggccctagggctgggagcgcggcgccgctctccgctgcgggggaggccatggcggaaccttcccaggccccgaccccggccccggctgcgcagccccggccccttcagtccccagcccctgccccaactccgactcctgcacccagcccggcttcagccccgattccgactcccaccccggcaccagcccctgccccagctgcagccccagccggcagcacagggactggggggcccggggtaggaagtgggggggccgggagcgggggggatccggctcgacctggcctgagccagcagcagcgcgccagtcagaggaaggcgcaagtccgggggctgccgcgcgccaagaagcttgagaagctaggggtcttctcggcttgcaaggccaatgaaacctgtaagtgtaatggctggaaaaaccccaagccccccactgcaccccgcatggatctgcagcagccagctgccaacctgagtgagctgtgccgcagttgtgagcaccccttggctgaccacgtatcccacttggagaatgtgtcagaggatgagataaaccgactgctggggatggtggtggatgtggagaatctcttcatgtctgttcacaaggaagaggacacagacaccaagcaggtctatttctacctcttcaagctactgcggaaatgcatcctgcagatgacccggcctgtggtggaggggtccctgggcagccctccatttgagaaacctaatattgagcagggtgtgctgaactttgtgcagtacaagtttagtcacctggctccccgggagcggcagacgatgttcgagctctcaaagatgttcttgctctgccttaactactggaagcttgagacacctgcccagtttcggcagaggtctcaggctgaggacgtggctacctacaaggtcaattacaccagatggctctgttactgccacgtgccccagagctgtgatagcctcccccgctacgaaaccactcatgtctttgggcgaagccttctccggtccattttcaccgttacccgccggcagctgctggaaaagttccgagtggagaaggacaaattggtgcccgagaagaggaccctcatcctcactcacttccccaaattcctgtccatgctggaggaggagatctatggggcaaactctccaatctgggagtcaggcttcaccatgccaccctcagaggggacacagctggttccccggccagcttcagtcagtgcagcggttgttcccagcacccccatcttcagccccagcatgggtgggggcagcaacagctccctgagtctggattctgcaggggccgagcctatgccaggcgagaagaggacgctcccagagaacctgaccctggaggatgccaagcggctccgtgtgatgggtgacatccccatggagctggtcaatgaggtcatgctgaccatcactgaccctgctgccatgctggggcctgagacgagcctgctttcggccaatgcggcccgggatgagacagcccgcctggaggagcgccgcggcatcatcgagttccatgtcatcggcaactcactgacgcccaaggccaaccggcgggtgttgctgtggctcgtggggctgcagaatgtcttttcccaccagctgccgcgcatgcctaaggagtatatcgcccgcctcgtctttgacccgaagcacaagactctggccttgatcaaggatgggcgggtcatcggtggcatctgcttccgcatgtttcccacccagggcttcacggagattgtcttctgtgctgtcacctcgaatgagcaggtcaagggttatgggacccacctgatgaaccacctgaaggagtatcacatcaagcacaacattctctacttcctcacctacgccgacgagtacgccatcggctacttcaaaaagcagggtttctccaaggacatcaaggtgcccaagagccgctacctgggctacatcaaggactacgagggagcgacgctgatggagtgtgagctgaatccccgcatcccctacacggagctgtcccacatcatcaagaagcagaaagagatcatcaagaagctgattgagcgcaaacaggcccagatccgcaaggtctacccggggctcagctgcttcaaggagggcgtgaggcagatccctgtggagagcgttcctggcattcgagagacaggctggaagccattggggaaggagaaggggaaggagctgaaggaccccgaccagctctacacaaccctcaaaaacctgctggcccaaatcaagtctcaccccagtgcctggcccttcatggagcctgtgaagaagtcggaggcccctgactactacgaggtcatccgcttccccattgacctgaagaccatgactgagcggctgcgaagccgctactacgtgacccggaagctctttgtggccgacctgcagcgggtcatcgccaactgtcgcgagtacaaccccccggacagcgagtactgccgctgtgccagcgccctggagaagttcttctacttcaagctcaaggagggaggcctcattgacaagtaggcccatctttgggccgcagccctgacctggaatgtctccacctcggattctgatctgatccttagggggtgccctggccccacggacccgactcagcttgagacactccagccaagggtcctccggacccgatcctgcagctctttctggaccttcaggcacccccaagcgtgcagctctgtcccagccttcactgtgtgtgagaggtctcctgggttggggcccagcccctctagagtagctggtggccagggatgaaccttgcccagccgtggtggcccccaggcctggtccccaagagctttggaggcttggattcctgggcctggcccaggtggctgtttccctgaggaccagaactgctcattttagcttgagtgatggcttcaggggttggaagttcagcccaaactgaagggggccatgccttgtccagcactgttctgtcagtctcccccaggggtggggggtatggggaccattcattccctggcattaatcccttagagggaataataaagctttttatttctctgtgaaaaaaaaaaaaaaa

SEQ ID NO: 38 - DNA, 8924 bp, HOMO SAPIENS
agcgcgctctgtgtggccgctgccgccatgttgttgtggttgtgagaaggcggcggcggcggcggagtagcagccggacgagacgtcccagcggctcaggcgctgcccagcgccggccctggcagggagcctggtggggtggcggagggggagactgtgccgtggagggcctcgccatgtcctgctgcccgacttccttgtgaaacctcctagtagaaaaagttcttgggacaaacttcatttgacttcaccataagggaaagaagagagccttgttggacactgaagaagggacggggatttctcctcctaatctgggcctcttgtcatggatgaagagactcggcacagccttgagtgcatccaggccaatcagatctttcccaggaagcagctgatccgggaggatgagaatcttcaggttcctttccttgaacttcatggagagagcacagagtttgtgggccgtgccgaggatgccatcattgccctttccaattacagacttcacatcaagttcaaggagtctcttgttaatgttccattacagcttatagaaagtgttgaatgccgagatatatttcagcttcatttgacttgcaaagactgcaaagttatcaggtgtcagttttcaacctttgagcagtgtcaagagtggctgaagagactgaacaacgcaatccgaccacctgctaaaatagaagatctcttctcatttgcataccatgcttggtgcatggaggtctatgccagtgaaaaagagcaacatggagacctgtgcagaccaggggagcatgtaacttcaaggtttaaaaacgaggtggagaggatgggttttgatatgaacaacgcctggaggatttccaacatcaatgagaagtacaaattatgtggtagctatcctcaagagctcatagtgcctgcctggatcactgacaaagaactggaaagtgtatcaagtttcaggtcctggaagcgcatccctgccgtcatctacaggcaccagagcaatggagctgtcattgcccgctgtggacagccagaggttagctggtggggctggcgaaatgcagatgatgagcatctggtacagtcagtagccaaagcttgtgcctctgactcccgatcgagtggcagcaagctgtcaactaggaacacttctcgagactttcccaatgggggagacctttctgacgtggagttcgattcttctctgtcaaatgcttcaggagcagagagtttagccatccaaccgcagaagcttttgatcttggatgcacgctcctatgcagctgctgtggcaaaccgagccaaaggaggaggctgcgaatgcccagagtattacccaaactgtgaagttgtgtttatggggatggcaaacattcattctattcggaggagttttcagtctctgcggttgctgtgcactcagatgccagatccgggaaattggctatcagctcttgaaagcacaaaatggctccatcacttgtctgtgcttctgaaatcagcgcttctggtagtgcatgctgtggatcaggatcagcggccggtgctagtacactgctcagatggctgggaccgcaccccccagattgtggcattggctaagctcttgctggacccttattaccgaaccatagagggtttccaggtcctcgtggaaatggagtggctggattttggccataaatttgctgaccggtgtggtcatggggagaactcggatgatctgaatgaacgttgcccagtgtttctgcagtggcttgactgtgttcatcagcttcagaggcaatttccttgctcttttgagttcaatgaagcattccttgtgaaactggtgcagcatacctattcctgcctgtttggaacattcctgtgcaacaacgccaaggagagaggggaaaagcatactcaggaacggacatgttccgtgtggtcacttcttcgggcaggcaacaaggctttcaaaaacctactgtattcctctcagtcagaagccgtgctgtaccctgtgtgccatgtgcgtaacctgatgctgtggagtgcagtgtacctgccctgcccatccccaaccacccctgtggacgacagctgtgcaccatacccagccccaggcaccagccctgatgatccccccctgagccggctaccaaagactagatcatacgacaatctgaccacagcctgtgacaacacagtgcctctggccagccggcgctgcagcgaccccagcctgaacgagaagtggcaggagcaccggcgctcactagagctgagcagcctggctggccctggagaggatcccctttctgccgacagcctagggaagcccaccagagtgccggggggtgccgagctttctgttgcagccggagtagctgaggggcagatggagaacatcttgcaggaggccaccaaagaggagagtggagtagaggaacctgcccacagggcaggcattgagatacaggagggtaaagaggaccctctcttagaaaaggagagcaggaggaagacacctgaggcctcagccattggacttcaccaagacccagaactgggtgatgctgctctgaggagccatctggatatgagctggcctctgttctcacagggcatttctgaacagcagagtgggctcagtgttctcctcagttctctccaggtcccccccaggggagaggattccctggaggtccctgtggagcagtttcgaatagaagagattgcagagggtagggaggaagcagttcttccaatcccagtagatgcaaaagttggctatggtacctcacagtcatgttctctgctaccttcccaagtcccttttgagaccagaggaccaaacgtggacagttctacagacatgttagtggaagataaggtgaagtcagtaagtgggccccaaggtcatcatagatcttgccttgtaaatagtggcaaggacaggcttcctcagaccatggaacccagcccttcagagacaagcctggtcgagaggccccaagtggggtctgtggtgcataggacttcccttggcagcactctcagcctgacacgttccccttgtgccttgcctttagccgaatgtaaagaggggcttgtgtgcaatggtgccccagagactgaaaacagggcctcagagcagcccccaggtcttagcaccctccagatgtaccccacacccaatgggcattgcgccaatggggaggctggtaggagcaaggactcactgagccgtcagctgtctgctatgagctgcagctctgcccacttacactcaaggaacttgcaccacaagtggctgcatagccactcaggaaggccatctgcaaccagcagccccgaccagccttcccgcagccacctggacgatgatggcatgtcagtgtacacagacacgatccaacagcgcctgcgtcagattgagtcaggccaccagcaggaagtagaaactttgaagaaacaagtccaggagctgaagagtcgcctggagagccagtacctgaccagctccctacactttaatggagactttggggatgaggtgatgacccgttggcttcctgaccacctggccgcccactgctatgcgtgcgacagtgccttctggcttgccagcaggaagcaccactgcagggacactgaccgtgttgatcaaacgtggaattgtgggaacgtattctgctccagttgttgtaaccagaaggttccagttcccagccagcagctctttgaacccagtcgagtatgcaagtcttgctatagcagcctacatcccacaagctccagcattgaccttgaactggataagcccattgctgccacttccaactgaagctcagtgacctgggtgggcagtggccaagctgctgttcctatgacaggcccactcaacctgggcagaccgagaggcccgtgcactttggaatgggagcgtggaaccacctgtacagagtgacagatttgggatgcaccactggattgtagattgatttttctttcctgtccccctactccctccctaccttttccatcctcctcctctgccttcaaaaaaggaaactttcccttggttgtcttaattttttttttttttgatggaagaccaagggttgccaggcccactgtaactgccgagctgcctgctgtcacgtgacactgagggatggcttgtttcttccgggtgggaggatggtggtcagagccaggagtatggagatctgagaccgtgagcagggaagaaagccagtgctaacatgcaaccattcctcacgccaccgccacatcagagctggttgggaaccctttgctgctggggaggctggaagcatattccccaagagcactgccctgggcatcatctccctcctgcgaggagctgagccagtcccctcacagatggataaatgaggctgatgtttggagggagaggcacacggtaaatggcatccccttaggcgcctctttgggaaaggaaagtggatgctcctttgaggcaggcgaggggctgggagtgggtagccgtcatgttgtcccccgtgggatcccatttttaacttgacccagattgtcttgggctccttttactttcagggggctgctttcctgggccaggctgtgtagcacttcccaccctcaggcatgagtacagactggtcaaaatgtttatgcagtcaaggccaaagcctgccctgagcccagacacacctgggtccccattctggggcctggtcccctaaacaatctcttcctcagccagcacagggaaatccagactcagggttccagaaatcccccgttcccaaaccaaaccaatcatggatcttccctttaaggggtagaatcagcctttagagttacaagcccctggaaaagggagcaggtcccatacaatcagcctttctcctcttctcttcttgggacaggaataactgctgagcagtccccctttgccactcctggctgtctgagtgggcacttgtctggctgctggccagcagtgaagggccacttggtgacttcgtagggttccttagagaagtgacatggccttgaggagattcagggcacctttcctcagtgagctttgatatggtccaaaaacagccttaaatcaagaatatttgtggaggtaggtgtggggaaggttggagaagagttaggtttgtgctttgtaatcttggcatccatgttttgtgcctgccctccctcttggggaggccatgcttgactctgctgaaagctgctaactggtgacagggtggatcatggtgaggactaggggtaaggtcagggaatgcttaagctctggccctgccctgtattcctcttccccttggtagcagttccctgaccaagggcaaggtgtgtctcaggaaggtggttctgtgcatgcctgggtgtggttaaggcgtggcccagaaggcttccctggtgctctcagtccaggcaaagcccagagcatctgagcacgtctctgacttccagtggcaacacagtttgaacgtggtgaaacagggtgtagttcttttccacattctgtgtcatctagtcgtgcaggtagggaaaaagttggtctaattgaagattgtgcatttcctagtgacaggtgccaagaggttatgatacgggtttcttgggtctgatgtacagtgtgaataaatgcttgcagctcttagctcttttttgatcgatgaagcacttttttattaatattttcctttgttaaaggaggaaccgtaactctccatagctgtacatataacccttttctcctaaagaggagtcagtcagtgctcctatatttttcattttttgtcaaagcaagaagtaaatactttagaattgttaaatatataaataaagcaaataaagttgagtgttccacatggtagcatttgctaacacttcctaattctttgccctgtggtttatcccctcttcgtcccttttccctctcacacagaagtgtttgagggcctgctgggaaactgacctttggcaaaggaaagctacagatagccttccgactctagaccttggcaaggagcctcaccatgatgttcaagcactgaacgcatttcctcagtgattttgctcctaaaatctcccaggctaaaagagggcaaagcagtcagggatctgacctggcagctattcctccttctctgaagagttcccatcagtagtcattacaactacctctcgcctcaaggctccatttttagctgctgctctgatttcagggcagccagtactctggccccttcagtcggggagtggaaggagatgtggggtgggggtgagaaaatgcttctgcctgttgttcttgaaggatagactatgggtgggcagagagaactgggggcagaaatggaattagatgtgattgggttatgcagtcaactagaggtctccttcccgccctctctccacacagagaggaacctctgctccttagctcttacagcaggactgtggcatctagtcacttcaatactagttcttgctcttcacagaggtagatttttctttaccctacagcactgttgggcatccctcccatcacatgggtctgtgggtgagatatgttatgctgttcctccctcgggaaggttggtattgaggggtgccttgctccagaggcgccagcccagcatctgtggtgagttggctaagatccagagtgacctgctcagagctccccagaggccttcactctttggggcagtctctctagggtcactttctgaatgtaccttctacctaaagtatacaaacacaaagagccagctgagctggttctagtgtgaaagccgtaagtgccacccagcaggcgtttgaaaacaagaaatcattcttctgtggaaggagaatgtgccatctcagctaccctcagtccgccaggcagcccagtctgtgtattcatatgaagttgtgaaaaccatgagtgtgtgccatggccatcgtgtctacacacagccactattgttcctgtgggctagtctccagcaaattaaaacactggcatggcctaggaagggcgttgcgagctcctaaatggaaagcttctctgggggtagggagatgaagagccaagatgctggtgaagcaggtgcagtgaggatccaaggcaaggaattgccctgagggaggtggctgcatatggagaaaggcagttctctgtgggcaaggccagcttgcttcaggctgtagagggaatttggtctgaagcaacagggcatgaactgtgactttgagctgccaggttgtcttcatctcagaactttcctatcctggcactctcgttacctttcttctataccttggcctctgtaactgcagtccaaaacaagttacagctgccttaatccactgagattctctatgaggatgtacagaaaagttttcctgtaataattttgcttatatgctaactcttttcatgttagcaaagaatattctatgaattagaatgttactgtggtagatctaaaggagaatgaacagaaggtgctggaggacctgttaaacaatctctggctattaaaaaacatcaagatgagaattaaaggcatatcctgatatacttgcctgcttgcacatgaggctgggagatcccatgcctgttgaagttaactctagccctgacctctattgatcttttgggaatgagggctgatttgaaggtgctgttgcaggatttcatttagctgctgccagttcaagtgacctgtccccagggctgcagctgtatccacctgattgcagtaggtgagggctaacagcagaatttaaagtggaccctgggctgtggagcaaagtgactatccatttggacttttggataatgtggcaggagtcccagctgtttaatttctagtcacattttccagaaagttgttctaagttgagattactgacaagatttctcaagggcaggaccagatatgtgagagacttctagttcagagctgacccctctaagcctctgacacttaaacacgagtcctgctgtccccagcacacaactgcactgaagccttgttcctctcggctggtgtagagctcatctgcatgttgtgtgcagataccagtagcctccctgcttgaacaggcctctcctaggctaggcaggtgttcagaggcatgaaggtctgggcaggggaagggcgtcttctgaaatgggagttaccaggtttttaaatgctgctattgttttatttaccatttaaggtcttttctattatatctgagtaactagtcagtttttcttacagtgctcatagcagttgtatttgaattgtattttcagtgaaatttgttttacattgccatttaaaattggcctttaacagcttcccaactagcttataagatttttttttttaatgaaaacataacccatgaggctcagatgctgttgaagaaataaatggtatgttgctgctgacagtagtgcttgcctattgtaacagcattggttctgctgtagcctcggtgaccatttaagttgaataaatctgtcattttcacccacaaacagttgttgagcccctggatttgggttgtcactgtggttctcctgccagtgctataatccagtgtcgtaggtgcagggtatgaatcagctcagcctcttaggagagaggggctctcagcgaggagggggcggggggggggtcactatttatcttccagaggcagggttcatggattcctgatgtttagaggcggaagggaccttaggtcacctacttccacggttttcatactgttctctggggcctcgtggagagggagcctccaggcccattcaaagctttattagatttaaaagtaagatctggtatgaagaaaggttttgtttgtttcttaaaataaaaagtctgaaaatcactaaaaaaaaaaaaaaaaaa

SEQ ID NO: 39 - DNA, 1682 bp, HOMO SAPIENS
gaaggtttttgctgcgccaacgcagtgaccgaaggctccgctcacgcccggcctgatcctgcctgaagatggtgccactggtggctgtggtatcagggccccgtgcccagctctttgcctgcctgctcaggctgggcactcagcaggtcggcccccttcagctgcacaccggggccagccatgcggccaggaaccattatgaggtgctggtgctgggtgggggcagtggcggaatcaccatggctgcccgcatgaagaggaaagtgggtgcagagaatgtggccattgttgagcccagtgagagacatttctaccagccaatctggacactggtgggtgctggtgccaaacaattgtcctcatctggtcgtcccacggcaagtgtgattccatctggtgtagaatggatcaaagctagagtgactgagttgaacccagacaagaactgcattcacacagatgacgacgagaagatctcctaccgatatcttattattgctctcggaatccagctggactatgagaagattaaaggcctacctgaaggtttcgctcatcccaaaatagggtcgaattattcagttaagactgtagagaagacatggaaagctctgcaggacttcaaagagggcaatgccatcttcaccttcccaaatactccagtgaagtgtgctggagcccctcagaagatcatgtacttatcagaagcctacttcaggaagacagggaagcgatccaaggccaatatcattttcaacacttctcttggagccattttcggggttaagaagtatgcagatgccctgcaggagatcatccaggagcggaacctcactgttaactacaagaaaaacctcattgaagtccgagccgataaacaagaggctgtatttgagaacctggacaaaccaggagagacccaagtgatttcatatgaaatgcttcatgtcacacctccaatgagcccaccagatgtcctcaagaccagtcctgtggctgatgctgctggttgggtggatgtggataaagaaactctgcaacacaggaggtacccaaatgtgtttgggattggggactgcaccaaccttcctacgtcaaagaccgctgctgcagtagctgcccagtcaggaatacttgataggacaatttctgtaattatgaagaatcaaacaccaacaaagaagtatgatggctacacatcatgtccactggtgaccggctacaaccgtgtgattcttgctgagtttgactacaaagcagagccgctagaaaccttcccctttgatcaaagcaaagagcgcctttccatgtatctcatgaaagctgacctgatgcctttcctgtattggaatatgatgctaaggggttactggggaggaccagcgtttctgcgcaagttgtttcatctaggtatgagttaaggatggctcagcacttgctcatcttggatggcttctgggccaaaactgcagtcactgaatgaccaagagcagcacgaaggacttggaacctatccttgtaaagagttccttgatgggtaatggtgaccaaatgcctcccttttcagtacctttgaacagcaaccatgtgggctactcatgatgggcttgattctttgggaataataaaatgaaataatacttttattttctgaataaaagtttgtcactgaaaaaaaaaaa

SEQ ID NO: 40 - DNA, 1893 bp, HOMO SAPIENS
attagacagcacactgctgactgttttcagttgtttctgtaacagcagaaagtgcactcactaggagtagtcagaattcaaaatgctcaagagaaagccatccaatgtttcagagaaggagaaacatcaaaaaccaaagcgaagcagcagttttgggaatttcgatcgttttcggaataattctttatcaaaaccagatgattcaactgaggcacatgaaggagatcccacaaatggaagtggagaacaaagtaaaacttcaaataatggaggcggtttgggtaaaaaaatgagagctatttcatggacaatgaagaaaaaagtgggtaaaaagtacatcaaagccctttctgaggaaaaggatgaggaagatggagagaatgcccacccatatagaaacagtgaccctgtgattgggacccacacagagaaggtgtccctcaaagccagtgactccatggatagtctctacagtggacagagctcatcaagtggcataacaagctgttcagatggtacaagtaaccgggacagctttcgactggatgacgatggcccctattcaggaccattctgtggccgtgccagagtgcatacggatttcacgccaagtccctatgacactgactccctcaaaatcaagaaaggagacatcatagacattatttgcaaaacaccaatggggatgtggacaggaatgttgaacaataaagtgggaaacttcaaattcatttatgtggatgtcatctcagaagaggaagcagcccccaagaaaataaaggcaaaccgaaggagtaacagcaaaaaatccaagactctgcaggagttcctagagaggattcatctgcaggaatacacctcaacacttttgctcaatggttatgagactctagaagatttaaaagatataaaagagagtcacctcattgaattaaatattgaaaacccagatgacagaagaaggttactatcagctgctgaaaacttccttgaagaagaaattattcaagagcaagaaaatgaacctgagcccctatccttgagctcagacatctccttaaataagtcacagttagatgactgcccaagggactctggttgctatatctcatcaggaaattcagataatggcaaagaggatctggagtctgaaaatctgtctgacatggtacataagattattatcacagagccaagtgactgaacacgcattcccaactatatatctacagatgcattccattttaactcttcttgagctaaaacgtcaaataggagaggaagataagataaatatttgtaaataaaacctaaagtttaaatgttttaatctgaataattgtacataaaattttgtatctctaacattccaaattactgtcaataaaatatatatttattattttaaatgctatgtgttaatatttcacttgcttgtattagaaaggcaaaatgtaagactttggtatgtgtgacatatgctttatttggctttattttacaagtacagtatctgcaaaaaacaaagtaaccttttttcatacctgccagttttgaatttatatatgttattgaacaaatagtaatagaggattcgctgttgaaacaagttgtccaagcaatgttatattcatttttatacttattgggaaagtgtgagttaatattggacacattttatcctgatccacagtggagttttagtaattatattttgttgatttcttcattttgttttctggtataaaagtagagataatgtgtagtcacttctgatttagtgaaaccaattgtaataattgtggaaatgttttgtctttaagtgtaaatattttaaaatttgacataccctaatgttaataataaaaagaactatttgcatattgcaaaaaa

SEQ ID NO: 41 - DNA, 5254 bp, HOMO SAPIENS
ccaactcaaacaggcagataaagagagatcaaagagatgagcatgagatacagtcccctcgtgcccaaggagacagggtggttacagacatggaaaatctgagaataatcacctctgataaagatcacagaagctgcccgggaggtgtttgattaaattcatgtattgaaaatattgttcagaccccatgtgacataactggagccagtgcagtgccatgaagaactacgagattagcctggatattaacttgtcttctagagaatagatttcatgttccattcttctgcaatggttaattcacacagaaaaccaatgtttaacattcacagaggattttactgcttaacagccatcttgccccaaatatgcatttgttctcagttctcagtgccatctagttatcacttcactgaggatcctggggctttcccagtagccactaatggggaacgatttccttggcaggagctaaggctccccagtgtggtcattcctctccattatgacctctttgtccaccccaatctcacctctctggactttgttgcatctgagaagatcgaagtcttggtcagcaatgctacccagtttatcatcttgcacagcaaagatcttgaaatcacgaatgccacccttcagtcagaggaagattcaagatacatgaaaccaggaaaagaactgaaagttttgagttaccctgctcatgaacaaattgcactgctggttccagagaaacttacgcctcacctgaaatactatgtggctatggacttccaagccaagttaggtgatggctttgaagggttttataaaagcacatacagaactcttggtggtgaaacaagaattcttgcagtaacagattttgagccaacccaggcacgcatggctttcccttgctttgatgaaccgttgttcaaagccaacttttcaatcaagatacgaagagagagcaggcatattgcactatccaacatgccaaaggttaagacaattgaacttgaaggaggtcttttggaagatcactttgaaactactgtaaaaatgagtacataccttgtagcctacatagtttgtgatttccactctctgagtggcttcacttcatcaggggtcaaggtgtccatctatgcatccccagacaaacggaatcaaacacattatgctttgcaggcatcactgaagctacttgatttttatgaaaagtactttgatatctactatccactctccaaactggatttaattgctattcctgactttgcacctggagccatggaaaattggggcctcattacatatagggagacgtcactgctttttgaccccaagacctcttctgcttccgataaactgtgggtcaccagagtcatagcccatgaactggcgcaccagtggtttggcaacctggtcacaatggaatggtggaatgatatttggcttaaggagggttttgcaaaatacatggaacttatcgctgttaatgctacatatccagagctgcaatttgatgactattttttgaatgtgtgttttgaagtaattacaaaagattcattgaattcatcccgccctatctccaaaccagcggaaaccccgactcaaatacaggaaatgtttgatgaagtttcctataacaagggagcttgtattttgaatatgctcaaggattttctgggtgaggagaaattccagaaaggaataattcagtacttaaagaagttcagctatagaaatgctaagaatgatgacttgtggagcagtctgtcaaatagttgtttagaaagtgattttacatctggtggagtttgtcattcggatcccaagatgacaagtaacatgctcgcctttctgggggaaaatgcagaggtcaaagagatgatgactacatggactctccagaaaggaatccccctgctggtggttaaacaagacgggtgttcactccgactgcaacaggagcgcttcctccagggggttttccaggaagaccctgaatggagggccctgcaggagaggtacctgtggcatatcccattgacctactccacgagttcttctaatgtgatccacagacacattctaaaatcaaagacagatactctggatctacctgaaaagaccagttgggtgaaatttaatgtggactcaaatggttactacatcgttcactatgagggtcatggatgggaccaactcattacacagctgaatcagaaccacacacttctcagacctaaggacagagtaggtctgattcatgatgtgtttcagctagttggtgcagggagactgaccctagacaaagctcttgacatgacttactacctccaacatgaaacaagcagccccgcacttctcgaaggtctgagttacttggaatcgttttaccacatgatggacagaaggaatatttcagatatctctgaaaacctcaagcgttaccttcttcagtattttaagccagtgattgacaggcaaagctggagtgacaagggctcagtctgggacaggatgctccgctcggctctcttgaagctggcctgtgacctgaaccatgctccttgcatccagaaagctgctgaactcttctcccagtggatggaatccagtggaaaattaaatataccaacagatgttttaaagattgtgtattctgtgggtgctcagacaacagcaggatggaattaccttttagagcaatatgaactgtcaatgtcaagtgctgaacaaaacaaaattctgtatgctttgtcaacgagcaagcatcaggaaaagttactgaagttaattgaactaggaatggaaggaaaggttatcaagacacagaacttggcagctctccttcatgcgattgccagacgtccaaaggggcagcaactagcatgggattttgtaagagaaaattggacccatcttctgaaaaaatttgacttgggctcatatgacataaggatgatcatctctggcacaacagctcacttttcttccaaggataagttgcaagaggtgaaactattttttgaatctcttgaggctcaaggatcacatctggatatttttcaaactgttctggaaacgataaccaaaaatataaaatggctggagaagaatcttccgactctgaggacttggctaatggttaatacttaaatggtcaatagaaaaagtaggctgggcgcggtggctcacgcctgtaatcccagcactttgggaggctgagaagggcggatcacgaggtcaggagatggagaccatcctggctaacacggtgagaccccgtctccgctaaaaatacaaaaaattagccgggcatggtggcaggtgcctgtagtcccagctactcggcaggctgcagcaggaaaatggcataaacccgggaggtggagcttgcagtgagccgagattgcaccactgcattccagcctgggtgactgagcgagactctgtctcaaaaaaaaaaaaaaaaaaaaaaagaaaaagaaaaagaaaagaaaagaaaaggtacatcagacatgactgcctgcatgaagtcaaacagggtaacaccagtgaagctcaagtcaagagctgtggatattttgtctaaccaacaagaagtctcaagaaatcaggcagtgcagctgcctgctctcagctatcgtatccagccaaaagatgcatgatgatggagtggtgggggaaggccagttcagtatcctatttaaaagtaaacttcctgaataatggatatatgtggagatacagacatagatatatagatacagctgtaattatttagcctcaagtgactttctccattgcttcacgctatgccactattttgcttctttaatttttttaaccttgcttagtattctatagtttgcccaaccagttttacgtccaaggaaaattagccaatgcataaaatatacaaactatgaaaggcaaggatcaggaaaccagagactttgccaccaaatctcagattattagaaactaggtgtcagggtttatcaagaaggccaggaaggccttttgggttaagccttacattcatgaagaacctcaagggtagatttttgagagcattccaaatgaatggtctctggtcaaatgaatgaatggtcaaatgaataaatctgccctcacagagatacaaaaggaaaaggaatataattcataccatttggtttaagccttacattcatgaagtacctcaagggtagatttttgagatcattccaaatgaagtcgaatctgccctcacagagacacaagaaaggaatataattcatacactattgcatttttaataaatcttttgaaatttgcagaattagattgtattgtgtattttcggttaaatgataattgaatgtaaatatttagatgcagcaccatattttataacccagctttagcatttcttcatattttaaggaaaccccccacctccttcttttaagggcgcttcttgctctctgaaatgccctgctaaatgcttctcttaattatttgaataaggtagtttggaataaagaaagaaaagatcactctacatacagatagtaaacttaatttgtgatcctatatatgagacagtataaaaatacagataagttttagaaagactcaaaacaatatgtaaatgactgatgtttgcattattaaggaagacttgggatgttgggtcaagaggggaaagtgttagtcaatccactttggagcaatatcatgaaggtcaattataattccatatacctttctttgatgccacagtcagagatagaatacagtttgggtggccatggatgtgccccaatacagtacacattttttggttaaatttgttttcagatcatttcatggaatctttgaagtatctttgactctaactttgacttggtggtggaccttccttggtttttataacacctaagagatatcctttagaattacatgtattttagcataaggaaattgaaaaagtaaaacatactggtttttttcaacaagaccatatgtaaattaaatagtgaaatgtgtatgagtttcagtagaactgtaccatcaacaatgtttccataaatatgcagagttctttcttttgtattgttatttacaatattgttaaattgaatgcatttgcaatttctaggattctaaagaattgagtacagaaagtagcaattttattatttgatgataatatgagaattactgtgccaatactgttttgataaataaatagatttttaaaaataaa

SEQ ID NO: 42 - DNA, 8114 bp, HOMO SAPIENS
acaacgcgctccctgcggggcgggcggcaacctccatgcggcctcgtccacgctcagcaccggggaagccgaggcggagaagccgcgcgcgcctcagaagctcccggacgcccagcggcggcgcgagcggcggcggcggcagcagcagcagcagcagcacggccaccggcgggagcggcagcagcaccggcagccccggcggcgcggcctcggccccggccccggccccggccggcatgtatcgctccggggagcgcctgctgggcagccacgcgctgcccgcggagcagcgggacttcctgcccctagagacgaccaacaacaacaacaaccaccaccagcccggggcctgggcccgccgggcgggctcctcggcgtcctcgcctccctcggcgtcctcgtccccgcacccttcggccgccgtccccgccgccgatccagccgattcggcctcgggcagcagcaacaagaggaagcgcgacaacaaggccagcacgtatggactcaactacagcctgctgcagcccagcggagggcgggccgcggggggcggccgagcagacggcggcggggtcgtgtacagcgggaccccgtggaaacggaggaactacaaccagggagtcgtgggtctgcatgaagaaatcagtgatttttatgaatacatgtctccaagacctgaggaggagaagatgcggatggaggtggtgaacaggatcgagagtgtaattaaggagctctggcccagcgctgacgtccagatatttggaagttttaaaactggactttatttacctactagtgacatcgacctagtggtgtttgggaagtgggagaacctacccctctggactctggaagaagctcttcggaaacacaaagtcgcagatgaggattcggtgaaagttttagacaaagcaactgtacctattattaaattaacagattcttttactgaagtgaaagttgatatcagctttaatgtacagaatggcgtgagagcagctgacctcatcaaagattttaccaagaaatatcctgtattgccatacttggttttagtattgaaacaattcctattgcagagggaccttaatgaagtatttacaggtggaattggttcttatagtctctttttaatggcagtcagtttccttcagttacatcccagggaagatgcttgcatccccaatacaaactatggtgttctcttaatagaattttttgaattatatggacgacacttcaattatttaaagactggcatccggataaaggatggtggttcatatgtggccaaagatgaagtacagaaaaatatgctagatggctacaggccatcaatgctttatatcgaagatcctttacaaccaggtaacgatgttggaaggagttcatatggggccatgcaagtgaagcaggcctttgattatgcctacgttgttttgagtcatgctgtatcaccaatagcaaagtactatcccaacaatgaaacagaaagcatactaggtagaataattagagtaacagatgaagttgccacatatagagattggatatcaaagcagtggggcttgaagaatagacctgagccttcatgcaatggaaatggtgttaccttgatagtagatactcagcagttagataaatgtaataataatctatctgaagaaaatgaagcccttggaaaatgtagaagtaaaacctcggaatctcttagtaaacactcttcaaactcttcatcaggtccagtgtcgtcctcttctgccacacagtccagctctagtgatgtagattccgatgcaacaccatgcaaaaccccgaaacagctgctttgccgtccgtccactgggaaccgagtagggtcgcaagatgtatccttggagtcctctcaggcagttgggaaaatgcaaagcacccaaaccactaacacatccaacagcaccaacaaatctcagcatggatcagcaaggctctttcgttcttccagcaaaggcttccaaggtacaactcaaacaagccatggttccttgatgacaaacaaacaacatcaaggcaaatccaataatcagtattaccatggcaaaaagaggaaacacaagagggacgcgcccctctcagacctctgtagatagtcagcgctgcgcggtggactgtcttctctgtgcaatgatctcatgctcaggacagttgcgcagggactcctgggagatattcaggagcctcacactgttcagacgttgacttagcaactgcgttttttcccagctcgccacagaatggatcatgaagactgacaactgcaaaaaaaacaaaacaaaacaaaaaaaaaagcaagcaaaaaagagggaaaaaaaaggctgcttatttgataagtcatatgctacaacagggtcattttaagatttaaagcttgaatgtaaaataaatatatttctcattggctttatgcagagttatagggaatagtattcagtgttggtagggtgatagaaacaaaaaacagtatcagaggatgaggtggggaaggaaaacaaaggtatctgataggaagtccagattccaaaggggaaagtgatctgtgcatgttttttttttaaatatttttgcatatatttaccattttattgtgtgtatatatagaagaccatataggagattgatatttgtaatagtggatttgttaataatactttttacataacattactgtttaaattgtaaacagattttttctcaggattagtttgaaaaataatctaaattgtcatcttaacatccatatatagggaagtgattagttctattactcaatttgtttttctcagcattgaaatgacttaatagaacccttgtgtcctgctgcaaaaatttttcctctctaaagaaaaggtttatggtggcaaatgatgtttattttattttgtaaaaaaaaaaaaatgtactatgtacttttgtgtaaacactgaaaaatctctggtcatctccgagaattaacttgcaactgttttctatagtgctgtcgtcttgggcaatgggcaattacatgactttgtgtttgcttcctttgcagtcttttttttttccccccatttcttcctaataggaaaaaaaaaaaaaaaaaggtcacccatgtctggtctcattcctgttgcagtgaaacttcgagttccacagactttgcatgctggcttctctaaccctgtgtgctgcgtgtgcctgtttctcatctcttattctttttaaaattcatgcttaactactgtgggagaataactgtaaacagctttaattaaatcatacttataaaaaactattttcttatattccactctatgcttttggtattgttgatctttacaaattaaatggtctttgataatggatctattttgtattgccttattaagaccaaatacttcttgtcatcccattctttatcctcttctttcatggaattgttatcgttaattaaaacttttttaaacattggcttgtttcaatcatactgtaaattttggttgtagtcagctttgagtgcaatgagatgtataattctgttatcattacctgttgagtttgaaactcagttgggaatatttaatataatagaatgtaagtgacatttctgaaaatgctttctttcagggtgaaagctcttatgtttagcatcaatgtgtatggctctgttaaatgcagccatttctgagacgagattcttttatatatatatacatataaagtactattggcttttaggagtttcttttatatacatttatgaaatactgaagaccaatcagaccattaatggacacttagtgtaactttttataaagaaaataatgctaaagtaagaccaaaactgatgtcatcactgaaattaacaattttcaatatgttcatattttaattcacaatggaaaaatgtgttccaaaactggaaactcatagtactcgtgtaaactgtggaagatttcaaatgtgatgttattttgacaatgttttaaattttagagtcacattttattctgatcagaatttttattgagatgttgagcttttgtttttgaaactagtttgtcataacattgtgcataatcacagtatttattttctaggacaattgtgaatgtgtagacttatgtttactgctaagggaacaattatttataaaataatattaaatccagtattagctgcctatttcagacacttaatacttgcagagatctatgttacatttaccacactgaagttttttttgttgttttttgtttgtttttaaagaatcaccctcattgttgaaagtaaatgtactcttagggtgcgaatattagtgttccaataagcatgtgattatattaaggtggtggtagcgggaagataattctgattccattgggaatcttaggttttcgtaaatttattgggaaaatagtttttcctgtactgctgaagtttctttttggtaaacagtatctttctaaaagaaaaaagcatgaaggagaaattgaggtgtgtatacatttcctcaaatgaccagcattgtattcgtgaatactgtgtatcttgcagtgaacagtgtggaagctgttcatttttcaatctgaagtaaaatactttcaagaacttttagtttgcctgctcatttgttttatacatttcatctatttgactcctatcttatttcttttttgagttttaatacttcctatattttgtgaatatatcagaaatgtgtcatttatatattagagtccattcatatccatgaatcataaccttcctttgctaatacttgttgaatgggattttacaaattctccctcactctggtgacatttctcaggcagtcatgtatgtgtacctggccattagaaatattaatatttaaagactgttttttagaggagctgatgggttggtgaggtgtcagcacaaaatcttactggttatgttttgatgataaaagtatatccattttttccctccagctttaaggtgactgtgaaggtgcctggttttgaatgtctttgtttggtttggagatgtcgcactcagttttcaaatctagcttggatctgtaggacctatgttttttacaagtaattgccctccagtcttcaacagttgattctgttttatttttatcctgttttgagtgtactttacctttacttgcattttgagcctcattaatatttaggttatttgatttggctccagatattcctagatctgcacagggcaaaacatgggctatagggtgagcatttttaattgtctttttctgctggaaccttatatctctccatgtgttttctgctccttccctcccccatgaaatggtaagtgtgacttgtgtttgcctgaacctgtggactagtgtttggggtttctggaaacactagagggtcagaaaagagtaatgaccaccgtgacgtgcaggattctcttgctgtgacatgttcattgcaaagccctctccagtgactaggaggtgtagttattaaggttgatctgttagaaatcaccattattaggtattagtggtagatgttgctgatacttttattggtcatgactacatctcagttttactttaatattgatctatagtttgatcagttccttgaattctaatatgttgatttctcagtgtttctgtcactaaccaagaatgtttctaggcagttggttgcttcacagtcaaaactaaatggtaaactatcaaaaatacattcccaattttgctgtgataaatattgaaatgttaaaattaatgaacagaagaatttattcttacccatctattcttgttctcctagttcattaaactttcagttattggaaaggcacattctcaaagtattttatgagcaaaatattctataaatgcgtctaacaaacctaattgaatataaaagttatatttagtagttactgttgatagtaattttcatcagggtcatagttcatctagtaaaatatttagagaatgatgttaacattccagcattaaagtgggaacaaagatttatatatgaaattccttaaaagagttcatcttgccttggtttctgaccctcaagactctagctacctgccatcttgtcaaaacatttgtgggtagaataagtgttaaagatcaaattttaatatgcttctcgatatttaacatagctaagaagccagattttactgtagaagttatttacatgatttgaaaacttgacctaactggaagcctttttctcagtcatcttgttctaagccatcttgacttcacacccttagcgacttttcttttttttttggtcaaagataatgagctaaatatatatagacgttgaatgttgacaaaattattaaccagaaaaattgcttataaaggctgctgatctatttgatacctagaattaaatatttgaggacagtttttagttaataaactgctaatgtttattttactgtctctcaggtttttggtttttttaaaaaaaatgtgtttggcctttacattttctacttaagtgtgtactttattgagtttaaccttgtctgtagcctagtagcctgaaagaaaaggagacagaaccagagagatggatgtagtgcattccctttggttattacacatttgtggtagctcctggatttactgagagatattttagctatgtcaataagaacagctaatgatgtggaaatcaggtgttctcttgtgtatttcagtgaacatttttattagtagttgcatatcatctctagttccacattttaacttaacgtctttgtggcttcaccactgagctacctttcactacaccagcttctgtgtggcctggtaacatggaaggtctctcctaaggacagtctggacgtattttgggggaatgttatttatcttaaagatgcctagaaacaaaacgcatatagtaccagtgagaaactatgaagtaaacaagttgctcaggccgggcatggtggctcacgcctgtaatcccagcactttgggaggccgaagcgggaggatggcttgaggctgggagtttgagaccttcatctcttaaaaaaacaaacaaaaacctgaatggtgaggtgtggtggaattgggtaggggagggaaaggaggacttggaaaagcattctccaaagccagcaacttggtgaagttcagtacttgcctcttagaggttaggccatgcctttcaaagagagtgaaatgatgggttatcagccacattcttggagttaatatttttcttcatctttcagtttgggttctgtgctattcatagttcttccctaagaccatttcattattaccttttatatttagttgcaatttattataatatgttgttttgtccctgaacttaatctcctaattttaagatcctctctgatttttgcatattgaaacttacagaagtcactttaaaaaagtcttttgaaagtcctacaatcctaaaataaatcacaagcttgtttgttagacgtgtcaagagtctccagtctttactactaaaaagcagcactgccttaacacacattgttatgggtgaaaagtgagggacgaccagtgtagtttctggatataaagtgtgaaggactgttgagttaaacatttttagtggaatatacatagataacgtgtatttagaaactttggtgaagccagtatttgtttttagtaacctttttatgtatttccttctttgattagcattgtcttcagtgttaagaaatgtggactcctgtgaggtgctggaggtttgaatcatcttgaaaactttccaatcttgtctagttaccactgcagagacactaaggaatttaccagaaaaagatatttgatacaagtgatttaagaaatctcaacatttcctgaggccgtatcactgggcaaccagtgatgaaaactatgaatgaattgcacacctggaagattttttaagctaatgacagtttcttcaaagatgtcaattatttgccttggaaattttataaattgcatttctatgcacatcggcctctagtgcttaccactcggtttattattcataatctgcaattcaataaaggctttgtgttttcatttatcttcaaaa

SEQ ID NO: 43 - DNA, 2432 bp, HOMO SAPIENS
agctgtttccctgtgggtcgggttggactgacttttgacagtcagccttcggctgcggagggggctcggcggcggccggcggagaaagttgctccgagaagaggctgggtcgagctgggccgagccgggcgcgcagggcgggcgtcgcgggcgtcccgggcggacgcggcgcggagactgccggcgcgtcccgggggttccgatttgaagaccttgcttctcatcacccactggattatgccccaggcttccctacccaatgatcctcttgcaacacgccgtgcttcctccacctaagcagccctcaccctcgcctcctatgtcagtggccaccaggtctacaggaaccttgcagcttccaccacagaagccttttgggcaggaggcttccttgcctcttgcaggggaagaagagttatcgaagggaggggagcaagactgtgccctggaggagctatgtaagcccctgtactgcaaactctgcaatgtcaccttgaactctgcacagcaagcccaggctcattatcagggtaaaaatcatggtaagaaactccgaaattactatgcagcaaatagctgtcctcctcctgctagaatgagcaatgtggtcgagcctgcagctactccagttgttccagtccctccgcagatgggctcctttaagccaggaggccgagtgatcctggccacggagaatgattactgtaagctctgtgatgcctccttcagttccccagctgtggctcaggctcactatcaagggaagaatcatgccaagaggctgcggctggcggaagctcagagtaactcattctcggaatcctcagagctgggtcaacggcgggccaggaaagaagggaatgagtttaagatgatgcctaacaggagaaatatgtatacagtacagaataattcagcaggtccttacttcaatccccgctctcggcagagaattccacgtgatctggccatgtgtgttactccaagtggccagttttactgctcaatgtgtaatgttggagctggcgaagagatggaattccggcagcatttagagagcaagcaacataagagcaaggtgtctgaacagcggtacaggaatgagatggagaatctgggatatgtatagtgattatcatattaagatagagcagcttttcctgcctgttgtttgccttttgtcaacttgccctgctttgtggtctttttgatatgagtacattcctctgcttaatgttaatacatgtaacccacagtggtaccatgagatgtcaaaacctgggggcccgggggcggggcggggggaggtgggtgtgaagaacgtgcttcttaggtcataacgcttttgcagggtcaatggtgttgagccgctcatagcatgtgacctacctaccccatcagaaataactttttatcttgctcaagttctggtcaactagtagcctgacggcttagaactttgactatttaaaagtttcattttcttttgcaattttagttttatgtactgttaaagaattgtactgaattctttttagatcacagtaaaaataggttggcagagatttcagtttcccagggcttaaccagaaccgccacctcaatgcattgtcagtagaatacattattagaaactgttaaggtctttcccgggacatttttttctgccattttcttttgcaattgtagttttatgtactgttaaagaattgtattgaattctttttagatcaaagtaaaaataggtcagcagagatttcagtttcccagggcttaaccagaaccgccacctcaatgcattgtcagtaggatacattattagaaactgttagggtctttcccaggacatttttttttctgtatcatgtctccccatcattgaagcgcaaattttcttgaattcaaatactcccaatgagcttgtatacttccaaacagctaaacttgatttccagttgtggatttcacacatataattgccgccttcttccctcctcttttttcccccctagttgaatcagcttgtctaacaagcccattttcatgccccagctgtgctgtgggttttccaagcctcatatttgaatattcaatgagtttaagatggatatgatttcaaaaaatagggccgggcgcggtggctcacgcctgtaatcccagcactttgggaggccgaagcaggcggatcacgaggtcaggaggtcgagatcatcctggctaacacagtgaaaccccatctctactaaaaatacaaaacattagccgggcgtggtggtgggtgcctgtagtcccagctactctggaggctgaggcaggagaatggcgtgaacccgggaggcggagcttgcagtgagccgagatcgcgccactgcactccagcctgggtgacagagcgagactccgtctcaaaaaaaaaaaaaaaaaaaaaaaaa

SEQ ID NO: 44 - DNA, 5168 bp, HOMO SAPIENS
gactggcttcgggcggcggccccggcggcctgtggacggacgggtgggccgaggtacaggccccacggccgccgtctcccgcttctgcccgcgcagagtccgcgccatggccgcctcgccgggctcgggcagcgccaacccgcggaagttcagtgagaagatcgcgctgcacacgcagagacaggccgaggagacgcgggccttcgagcagctcatgaccgacctcaccctgtcgcgggttcaatttcagaagcttcagcaactgcgccttacacagtaccatggaggatccttaccaaatgtgagccagctgcggagcagtgcgtcagagtttcagccgtcatttcaccaagctgataatgttcggggaacccgccatcacgggctggtggagaggccatccaggaaccgcttccaccccctccaccgaaggtctggggacaagccagggcgacaatttgatggtagtgcttttggagccaattattcctcacagcctctggatgagagttggccaaggcagcagcctccttggaaagacgaaaagcatcctgggttcaggctgacatctgcacttaacaggaccaattctgattctgctcttcacacgagtgctctgagtaccaagccccaggacccctatggaggagggggccagtcggcctggcctgccccatacatgggtttctgtgatggtgagaataatggacatggggaagtagcatctttccctggcccattgaaagaagagaatctgttaaatgttccgaagccactgccaaaacaactgtgggagaccaaggagattcagtccctgtcaggacgccctcgatcctgtgatgttggaggtggcaatgcttttccacataatggtcaaaacctaggcctctcacccttcttggggaccttgaacactggagggtcattgccagatctaaccaacctccactactcgacacccctgccagcctccctggacaccaccgaccaccactttggcagtatgagtgtggggaatagtgtgaacaacatcccagctgctatgacccacctgggtataagaagctcctctggtctccagagttctcggagtaacccctccatccaagccacgctcaataagactgtgctttcctcttccttaaataaccacccacagacatctgttcccaacgcatctgctcttcacccttcgctccgtctgttttcccttagcaacccatctctttccaccacaaacctgagcggcccgtctcggcgtcggcagcctcccgtcagccctctcacgctttctcctggccctgaagcacatcaaggtttcagcagacagctgtcttcaaccagcccactggccccatatcctacctcccagatggtgtcctcagaccgaagccaactttcctttctgcccacagaagctcaagcccaggtgtcgccgccacccccttaccctgcaccccaggagctcacccagcccctcctgcagcagccccgcgcccctgaggcccctgcccagcagccccaggcagcctcctcactgccacagtcagactttcagcttctcccggcccagggctcatctttgaccaacttcttcccagatgtgggttttgaccagcagtccatgaggccaggccctgcctttcctcaacaggtgcctctggtgcaacaaggttcccgagaactgcaggactcttttcatttgagaccaagcccgtattccaactgcgggagtctcccgaacaccatcctgccagactccagcaccagcctgttcaaagacctcaacagtgcgctggcaggcctgcctgaggtcagcctgaacgtggacactccatttccactggaagaggagctgcagattgaacccctgagcctggacggactcaacatgttaagtgactccagcatgggcctgctggacccctctgttgaagagacgtttcgagctgacagactgtgaacagaaggcagtggaacagaagaatgtttttctgcaacagccaaaatagaatggaatagaatgaagccagctgataccacgggctttcgttatcttgacatagaaggaagcaatgccacggctccagggtttcagatgagatcccatctcagacactgtggcttcctccagatcacacagctttgtactgcctctcccgcctgtggccaaagtcgtgttgcagcaggcaggctgcttggagcttcccatgaactggaaagctcacctccactgcatctttttactggccatccagtcagccgatgtgtaagagtaggaaatactgtgtcactggaggcctccgtagcattgtgtagtgtgctcagaaccactgatctccgtccgcaccgaaggcgggcccggagtgggaggctcggcctggggcggcggcaccggagagggcacctcgatgcctgctctgacctgacccagagggcgaggccctccagcgggggacattcccaggctgagtggaccccacggctctctcccacgcctggattacgacatgaagtttttaccacaagcccgagggcaggcttgagttaggcagactgaaggctaattttcattttctcccagctggtttctgctgcttcagaaaagtacaccttttccttatggaccagaggaagaggaagaccattttatcagtcactgaaaagagtcccctggcactgatgagcctgaagagaactgtgctcctcctcgggggctggggaaggaagacagggactgcaggtgtctcatactcagtggcctccagacaaactccagacaagcacagacctccccactaagagcagccagagggagctggtgaggccctaaccccacccaccgagcaactgagcttccccatccctccccagagctgtgtctctgtgggctgggagtctaatgtcacccccctagaccgtaagctccttgagggcagggacagtgccttatcattgttgaacccgtagcacctaacacgtgcgtggcagcacagtcgtgtgctggagtgagtgctgcagaaccgtgcgtgcagcgcatgatgaatgagtgcgtccgccatgccgtaaggcaggctcacctgtagctatccccttccctgccagatcttctcagagctttagcttttctagcactcgtgcctatggtgaagcatgcactttaatatgcttttaacactaggtgaccaaatcacagtgaagccgggcactgcattctccttgggctgtgctccacgcgggtgggtgggagctgtcttctgagtacatccggaagggctgagcaggtgagtgccctgagcatcctggctgggccccacccaggaagatcttccttctcagatccacgtttggctctaaattgcttcaagtagagattcattctttgaggttgaaaaaatagtttatagtaaaacgaaggcctaattcatggaagcatcattagtcatcaataccttctcataaaatagatgggccagatttccaccaccgcctgcctcctctaacttgggtgatgccagtaggtttgaagggggcagagcactgcagggggaggggggggtctaggctgtgagaggacagggtggagaggaggagaaccctgaaggagagacggaagatgccaggacctttgcttggacagccattgcccttccaggagaccctggagtgtactgagggttgctggactgttccacccagaggagcaaggctgtacaatgagggtctgaatctggcacacctgtcccttatgtaaaaggagtcgtggtcacaagaccctgggctggttagcctctcccgacctcattccatttctatcttctgaccttgcctctcatctttaaaataaccctcatggggtgcccctccaccttcctctggaatccaagtattcctgtttcacatttgccccaaatctttgctgtggaattgggaaatcaaaccagagtcctcctcgcctgatttccagctcaggaagggcctgctggcctgccctgttcccagttacactttcagatccctttgtgctcaagatctcagagggggtggctttttgttaaagagccttcagtcgcaatgctacccagcaccccatgtgccaaaagaaaccagctcctgtgtcaaagggcttccaaacctgatctcactctcaacaggcgatggtgctgatgtttcaagaattgtgtttttataaaacagaggtctcagcatagtcactcttcacatagtgccttacccatgggtatcgtcatatccgggtcccagttcagtttgtctgcacagcagccaccctgcctggcaacagagaccccaagacctacacagtgaaccctactgccccaaaggcgttctccaggtgacttgtgaaaacagacctccggggaagtgatttattgggggtgtacactgggggcaatatggtttagcactgaattcaatttgtccttaggtctatgagtgagtccgatcttttcttgtgaaaggttttgggcatcgtacaacccactctgcctagaaggtgtggaggactcaccacgggcagggtcgccctggcccacagcacgtgagcctgcactcactgcggcctttgtaacaaaaccagttgtggtcctcagcatttgaagcagctgcatacttcagagtaaactatttttcattatttagttttgtcacaagaaatcgaccattgtactactctcacttacagcagttaaacagcatagaactaaaaacctgtctgcatttccattttttctttctgtatggttgtgggttttaggacatagggggttaggagaaggggtttcttgatcatgtcatgaattctcctttgtcctgtttctcctgtttcatttctcctccgcctgctgtatattacctgagctggtgttgtatcttcaagtccatatgcgtatttgcagacctttcctgttcccactcttgttggctcttctgatttatgcacagatggttcccagcatgtgtccagtgcttcatggatgggaccatcccagcaactaatcagacttcctgccagtgtcctaacccccagggcaccctgttcaaccatatttaaaaattggaatttgtataaagttgcttccaagttttataatgcatcattttacatcttttgtaattaaaagcatcacaatgaggttgtctctgca

SEQ ID NO: 45 - DNA, 3898 bp, HOMO SAPIENS
ggcggggctggggggaggccgccgagtcggccgcggccgaggaggggcaggcggaggtcgggggcgccgcggccgcggggtcaggttccccggcgggaggcgcaggtggcggcctggggagctggcggccgctcctcgcctggctgcagcggcggcagccccagtgctgcccctgtgcggcgcccctttcccgctccgccgcgcactgttgtcatggaggaaccaagatggcggctctggcctacaacctgggcaagcgggagatcaaccactacttcagcgtgaggagcgccaaggtgctggcgctggtggccgtgctgctgctcgcagcgtgccacctcgcctcccgccgctaccgaggcaatgattcgtgtgaataccttctctcaagtggcagatttcttggagagaaagtttggcaacctcacagttgtatgatgcataaatacaaaatcagtgaagcaaagaactgccttgtagataaacatattgcatttattggagattccagaattcgtcaattgttttattcttttgtaaaaataattaatccccaattcaaagaagaaggaaataagcatgaaaacattccttttgaagacaagactgcatcagttaaagtggattttctgtggcatcctgaagttaatggttctatgaaacagtgtatcaaagtgtggactgaggattccattgcaaagccacatgtgattgtagcaggagctgccacatggtccatcaagattcacaatggtagcagtgaagcgctttctcaatataaaatgaacatcacctccatagcaccacttttagaaaaattggcaaagactagtgatgtttattgggtcttacaagatcctgtttatgaagatctattaagtgaaaataggaagatgatcactaatgagaagatagatgcttacaatgaagctgcagtcagtattttgaatagtagcaccagaaattctaaatcaaatgttaagatgttcagtgtttccaaattaattgctcaagaaaccatcatggaatctttggatggcttacatcttcctgaatcgagcagagaaactactgcaatgattcttatgaatgtgtattgcaataagattttgaagcctgtagatgggtcctgttgtcaacctcggcctcctgttactctcatacagaagctagctgcttgttttttcactttatctattatcggatatttaattttttacataattcatcgtaatgctcatcggaagaataagccgtgtactgatttggaaagtggagaggaaaagaaaaatattatcaatacccctgtgtcttcattagaaatacttttacaatctttctgcaaacttggcctgattatggcatatttctatatgtgtgaccgtgcaaatctgttcatgaaggaaaacaaattttatacacattcatctttctttattccaattatctacattttggttttgggagtattttataatgaaaatactaaagagactaaagtattaaatagagaacaaacagacgaatggaaaggctggatgcaacttgtgattttgatttatcacatttctggagcaagtacatttttgcctgtatacatgcacattcgagttctggttgctgcatatttatttcagacagggtatgggcatttctcatacttttggataaaaggagattttggaatctatagagtatgtcaggttttatttcgtctcaatttcctggtagtggtgttatgtatagtaatggatcgaccttatcaattctattactttgtccccttggtcactgtatggttcatggtcatatatgttactttagcactatggccacaaataatccaaaaaaaagcaaacggaaattgtttctggcattttggcttactgttgaaactaggctttttgctgttattcatatgttttttggcatattctcagggtgcatttgagaagatcttttctctttggccattgtccaagtgttttgaactgaaagggaatgtatatgaatggtggttcagatggaggttagaccgttatgtagttttccacggaatgctgtttgcttttatttatctggctttgcagaagcgtcaaatactttctgaaggaaagggtgaacctcttttttcaaacaaaatttcaaattttctgttgtttatttcagtagtttctttcttgacctattccatctgggctagcagttgtaaaaacaaagcagagtgcaatgaactccatccgtctgtttctgtggtacagattttagccttcatcctaataagaaacatccctggatatgcccgttcagtttacagttcattttttgcttggtttggaaaaatttcattagagctatttatttgccagtatcacatatggctggcagcggacacaaggggtatcttggtactgatacctggaaaccctatgctcaacatcattgtcagcactttcatatttgtttgtgtggcacatgaaatttctcagatcactaatgatcttgcacagattattattcctaaagataactcatctctcttgaaaaggttggcatgtatagctgcatttttttgtggactcctcatcttatcatccattcaagataaatcaaaacattaggttccaaaaattctaaaaaacctaaactcttcaggctacctttgtgtgtctctagaagagaaaagcatctatctggagatataaatgtgtatgtaaatataaacgtttgtggcaagaggacagttctgtgacatctgttgaacatatgtggttgtatatattggaaatgtacatatccaatatgaaatactaaaacaaacaaacaaacaaaaaaccagaatgcattgtataggattgcatgtgaagtcttttctactgaatctatatttccatttgtaagtgattttaagttaacatatgaaggcagggaaatgattacctttccagtaaaaagtatagataatttaattaacttagtgacaccaccaagtgttttgatataactaaatttgtggtaataagactgtctgcacctgtattcattgtggaacttcctctttcattggaaactttcttactcaagaatgacggcagtattgttttcttatatgtgcaatgaagtggaatgataaacagtatgcctttaatttatatgtgttcttgttctgatgttgtttcctgaaatgatttttcttcctaactgtggttttcgggtatgcaagcctaaatctttgtacactttgtctcacagaatagttctgaggctccatgacagggttttgtcattgttgatgttattgttgcttcgttttataaaaaagccaaaattttttttccaatccaaacgttcacctgtttcctttcctcaagctataccagtgtaataccagttaccctgtggatccatttaatatgttatccccactaattaattttcgtatattatttccaatatttggaaagctctttatagccatttggtatttcctattacccacctcctattttaaatatttatcagtctaaacttgtgcagtgtagtaaacatgcaagttgttacgattgagctgtattaccataagtagaattttaagtaaactggtgaatttgggcaataaatgtttttgctttttgtttgatttttttttacaagctaactgttagaggtatacatttatttatctgttgtacagatttgattatgattttaatgtttgaaagattgcacttgtttgcttttactatatgtggggtaaaatatattttctgttcacagtatatgaaaatatggagtaatttaaacagtaaataaacattctgtggatgcttatttttgtattggcaaagtatcaattaaactatatgtgttctttttcaaaaaaaaaaaaaaaaaaaaa

SEQ ID NO: 46 - DNA, 2612 bp, HOMO SAPIENS
atgcgtgcaggcccggagccccaggcgctggcggggcagaaacgcggcgccctgcgtcttctggttccgaggctggtcctcaccgtttccgctccggcggaagtgaggaggagggtccttcgacccgtgctgagctggatggaccgcgagacgcgcgccctcgccgacagccacttccgaggcctgggggtcgatgtccccggcgtcggccaggctccgggccgggtagccttcgtctcggagccgggcgccttctcctacgccgactttgtgcggggcttcttgctgcccaacctgccctgcgtgttttccagcgccttcacgcagggctggggcagccggcggcgctgggtgacgcccgcggggaggcccgacttcgaccacctgctacggacctacggagacgtggttgtaccagttgcaaactgtggggtccaggaatacaactcgaaccccaaagagcacatgactctcagagactacatcacctactggaaagagtacatacaggcgggctactcctctcccaggggctgtctctacctcaaagactggcacttgtgcagggactttccggtggaggacgttttcaccctgcctgtgtacttctcgtccgactggctgaatgagttctgggatgcactggatgtggatgactaccgctttgtctacgcggggcctgcgggcagctggtccccgttccatgctgacatcttccgctccttcagctggtctgtcaatgtctgtgggaggaagaagtggctcctcttccccccagggcaggaagaggccctgcgggaccgccacggcaacctgccctacgacgtgacctccccagcactctgcgacacacacctgcacccacggaaccagcttgctggcccacccttggagatcacgcaggaagcgggcgagatggtgtttgtgcccagtggctggcaccaccaggtgcacaacctggatgacaccatctccatcaaccacaactgggtcaatggcttcaacctggccaacatgtggcgcttcttgcagcaggagctatgcgccgtgcaggaggaggtcagcgagtggagggactccatgcccgactggcaccaccactgccaggtcatcatgaggtcctgctcgggcatcaactttgaagagttttaccacttcctcaaggtcatcgctgagaagaggctcctggtcctgagggaggcagccgctgaggacggtgctgggttgggtttcgaacaggcagcctttgatgttgggcgcatcacagaggtgctggcctccttggttgcgcaccccgacttccagagagtggacaccagcgcgttctcaccacagcccaaagagctgctgcagcagctgagagaggctgttgatgctgctgcggccccatagcacctgtcgtgaggatagaaggacgggtggaagagaggcagcctcctgctccggggcccttccagaaataaagaccgccctccctgtgacctggggcccacccctgtcgaggcttgtggcctggctgttcatggccactgcctgggtgcctgttttcaggtgaggcccaatgaggtcagggacccaagatgggatgtggcccttctgacctgcagcaggcctgctgggagctcggagatggtgccaggacctggctcttttgggggccctgcctccttaggccaggacgcctgagctgacaggagtctgtgtctggtgtgccttctctggtggctcctcttaataggccagccctgtcccctcgtctcaggccattggaccacccctggctctgccctgtgggttcagggaggggttggagcagtgctgggcaagctcaccagggcctccaggcagggctggggttggcctccatcacctccaggtgatgggctgtggaaccagcggcctgcgccttcctctgggtacccagagtggagggctgggttgggctggcctttgccacctccctgcctttgcagggcctgtggacagctggagaggccacagatggggtggaatcccatctgctgctgaatcctcacctgggcctgagggactgtgcctgctgtgcactcacagctgggtcttcccaaggatgctgttctcaggagtggtgggtccccagcccctcttcacactgggtatgatggaggtgtgggcgggctcgtccaggccgatcaaggcacagcagtgagcagcggaggcctgtggtggggaatggactctcgtgggatcctcttgcagaggatgccccaggcctgaaccctctagtggatccacagtttgtggagactggcactctcccagccctgtccttgaccgagagtccagcattttttcagttggcccctggttggctgcctcaccccagcaggggaggaggcatccgaatccacagggacggcacgtgccatggctatgcacattgcctgcccgtggcatcaactggggccgctggcacttgtctaggatggaagcccccaagaagggcaggggtttctgtctgctctgttcagtgaatcatgtgaagtgcttgcaaaggcagctttacacagtaggtgcttcatatgtgtctgtcgaatgaatgcgctccagccaacaaaaaaaaaaaaaaaaaa

SEQ ID NO: 47 - DNA, 5631 bp, HOMO SAPIENS
gcggccgcggcgcggagccgagcgggcgtccgtcgccggagctgcaatgagcggcgcccggaggctgtgacctgcgcgcggcggcccgaccggggcccctgaatggcggctcgctgaggcggcggcggcggcggcggcggctcaggctcctcggggcgtggcgtggcggtgaaggggtgatgctgttcaagctcctgcagagacagacctatacctgcctgtcccacaggtatgggctctacgtgtgcttcttgggcgtcgttgtcaccatcgtctccgccttccagttcggagaggtggttctggaatggagccgagatcaataccatgttttgtttgattcctatagagacaatattgctggaaagtcctttcagaatcggctttgtctgcccatgccgattgacgttgtttacacctgggtgaatggcacagatcttgaactactgaaggaactacagcaggtcagagaacagatggaggaggagcagaaagcaatgagagaaatccttgggaaaaacacaacggaacctactaagaagagtgagaagcagttagagtgtttgctaacacactgcattaaggtgccaatgcttgtcctggacccagccctgccagccaacatcaccctgaaggacctgccatctctttatccttcttttcattctgccagtgacattttcaatgttgcaaaaccaaaaaacccttctaccaatgtctcagttgttgtttttgacagtactaaggatgttgaagatgcccactctggactgcttaaaggaaatagcagacagacagtatggaggggctacttgacaacagataaagaagtccctggattagtgctaatgcaagatttggctttcctgagtggatttccaccaacattcaaggaaacaaatcaactaaaaacaaaattgccagaaaatctttcctctaaagtcaaactgttgcagttgtattcagaggccagtgtagcgcttctaaaactgaataaccccaaggattttcaagaattgaataagcaaactaagaagaacatgaccattgatggaaaagaactgaccataagtcctgcatatttattatgggatctgagcgccatcagccagtctaagcaggatgaagacatctctgccagtcgttttgaagataacgaagaactgaggtactcattgcgatctatcgagaggcatgcaccatgggttcggaatattttcattgtcaccaacgggcagattccatcctggctgaaccttgacaatcctcgagtgacaatagtaacacaccaggatgtttttcgaaatttgagccacttgcctacctttagttcacctgctattgaaagtcacattcatcgcatcgaagggctgtcccagaagtttatttacctaaatgatgatgtcatgtttgggaaggatgtctggccagatgatttttacagtcactccaaaggccagaaggtttatttgacatggcctgtgccaaactgtgccgagggctgcccaggttcctggattaaggatggctattgtgacaaggcttgtaataattcagcctgcgattgggatggtggggattgctctggaaacagtggagggagtcgctatattgcaggaggtggaggtactgggagtattggagttggacagccctggcagtttggtggaggaataaacagtgtctcttactgtaatcagggatgtgcgaattcctggctcgctgataagttctgtgaccaagcatgcaatgtcttgtcctgtgggtttgatgctggcgactgtgggcaagatcattttcatgaattgtataaagtgatccttctcccaaaccagactcactatattattccaaaaggtgaatgcctgccttatttcagctttgcagaagtagccaaaagaggagttgaaggtgcctatagtgacaatccaataattcgacatgcttctattgccaacaagtggaaaaccatccacctcataatgcacagtggaatgaatgccaccacaatacattttaatctcacgtttcaaaatacaaacgatgaagagttcaaaatgcagataacagtggaggtggacacaagggagggaccaaaactgaattctacagcccagaagggttacgaaaatttagttagtcccataacacttcttccagaggcggaaatcctttttgaggatattcccaaagaaaaacgcttcccgaagtttaagagacatgatgttaactcaacaaggagagcccaggaagaggtgaaaattcccctggtaaatatttcactccttccaaaagacgcccagttgagtctcaataccttggatttgcaactggaacatggagacatcactttgaaaggatacaatttgtccaagtcagccttgctgagatcatttctgatgaactcacagcatgctaaaataaaaaatcaagctataataacagatgaaacaaatgacagtttggtggctccacaggaaaaacaggttcataaaagcatcttgccaaacagcttaggagtgtctgaaagattgcagaggttgacttttcctgcagtgagtgtaaaagtgaatggtcatgaccagggtcagaatccacccctggacttggagaccacagcaagatttagagtggaaactcacacccaaaaaaccataggcggaaatgtgacaaaagaaaagcccccatctctgattgttccactggaaagccagatgacaaaagaaaagaaaatcacagggaaagaaaaagagaacagtagaatggaggaaaatgctgaaaatcacataggcgttactgaagtgttacttggaagaaagctgcagcattacacagatagttacttgggctttttgccatgggagaaaaaaaagtatttccaagatcttctcgacgaagaagagtcattgaagacacaattggcatacttcactgatagcaaaaatactgggaggcaactaaaagatacatttgcagattccctcagatatgtaaataaaattctaaatagcaagtttggattcacatcgcggaaagtccctgctcacatgcctcacatgattgaccggattgttatgcaagaactgcaagatatgttccctgaagaatttgacaagacgtcatttcacaaagtgcgccattctgaggatatgcagtttgccttctcttatttttattatctcatgagtgcagtgcagccactgaatatatctcaagtctttgatgaagttgatacagatcaatctggtgtcttgtctgacagagaaatccgaacactggctaccagaattcacgaactgccgttaagtttgcaggatttgacaggtctggaacacatgctaataaattgctcaaaaatgcttcctgctgatatcacgcagctaaataatattccaccaactcaggaatcctactatgatcccaacctgccaccggtcactaaaagtctagtaacaaactgtaaaccagtaactgacaaaatccacaaagcatataaggacaaaaacaaatataggtttgaaatcatgggagaagaagaaatcgcttttaaaatgattcgtaccaacgtttctcatgtggttggccagttggatgacataagaaaaaaccctaggaagtttgtttgcctgaatgacaacattgaccacaatcataaagatgctcagacagtgaaggctgttctcagggacttctatgaatccatgttccccataccttcccaatttgaactgccaagagagtatcgaaaccgtttccttcatatgcatgagctgcaggaatggagggcttatcgagacaaattgaagttttggacccattgtgtactagcaacattgattatgtttactatattctcattttttgctgagcagttaattgcacttaagcggaagatatttcccagaaggaggatacacaaagaagctagtcccaatcgaatcagagtatagaagatcttcatttgaaaaccatctacctcagcatttactgagcattttaaaactcagcttcacagagatgtctttgtgatgtgatgcttagcagtttggcccgaagaaggaaaatatccagtaccatgctgttttgtggcatgaatatagcccactgaccaggaattatttaaccaacccactgaaaacttgtgtgttgagcagctctgaactgattttacttttaaagaatttgctcatggacctgtcatcctttttataaaaaggctcactgacaagagacagctgttaatttcccacagcaatcattgcagactaactttattaggagaagcctatgccagctgggagtgattgctaagaggctccagtctttgcattccaaagccttttgctaaagttttgcactttttttttttcatttcccatttttaagtagttactaagttaactagttattcttgcttctgagtataacgaattgggatgtctaaacctatttttatagatgttatttaaataatgcagcaatatcacctcttattgacaatacctaaattatgagttttattaatatttaagactgtaaatggtcttaaaccactaactactgaagagctcaatgattgacatctgaaatgctttgtaattattgacttcagcccctaagaatgctatgatttcacgtgcaggtctaatttcaaagggctagagttagtactacttaccagatgtaattatgttttggaaatgtacatattcaaacagaagtgcctcattttagaaatgagtagtgctgatggcactggcacattacagtggtgtcttgtttaatactcattggtatattccagtagctatctctctcagttggtttttgatagaacagaggccagcaaactttctttgtaaaaggctggttagtaaattattgcaggccacctgtgtctttgtcatacattcttcttgctgttgtttagtttgttttttttcaaacaaccctctaaaaatgtaaaaaccatgtttagcttgcagctgtacaaaaactgcccaccagccagatgtgaccctcaggccatcatttgccaatcactgagaattagtttttgttgttgttgttgttgttgtttttgagacagagtctctctctgttgcccaggctggagtgcagtggcgcaatctcagctcactgcaacctccgcctcccgggttcaagcagttctgtctcagccttctgagtagctgggactacaggtgcatgccaccacaccctgctaatttttgtatttttagtagagacgggggttccaccatattggtcaggcttatcttgaactcctgacctcaggtgatccacctgcctctgcctcccaaagtgctgagattacaggcataagccagtgcacccagccgagaattagtatttttatgtatggttaaaccttggcgtctagccatattttatgtcataatacaatggatttgtgaagagcagattccatgagtaactctgacaggtattttagatcatgatctcaacaatattcttccaaaatggcatacatcttttgtacaaagaacttgaaatgtaaatactgtgtttgtgctgtaagagttgtgtatttcaaaaactgaaatctcataaaaagttaaatttttgtctgaaaaaaaaaaaaaaaaa

SEQ ID NO: 48 - DNA, 11433 bp, HOMO SAPIENS
aggctgcttcgttgcacacccgagaaagtttcagccaaacttcgggcggcggctgaggcggcggccgaggagcggcggactcggggcgcggggagtcgaggcatttgcgcctgggcttcggagcgtagcgccagggcctgagcctttgaagcaggaggaggggaggagagagtggggctcctctatcgggaccccctccccatgtggatctgcccaggcggcggcggcggcggcggaggaggaggcgaccgagaagatgcccgccctgcgccccgctctgctgtgggcgctgctggcgctctggctgtgctgcgcggcccccgcgcatgcattgcagtgtcgagatggctatgaaccctgtgtaaatgaaggaatgtgtgttacctaccacaatggcacaggatactgcaaatgtccagaaggcttcttgggggaatattgtcaacatcgagacccctgtgagaagaaccgctgccagaatggtgggacttgtgtggcccaggccatgctggggaaagccacgtgccgatgtgcctcagggtttacaggagaggactgccagtactcaacatctcatccatgctttgtgtctcgaccctgcctgaatggcggcacatgccatatgctcagccgggatacctatgagtgcacctgtcaagtcgggtttacaggtaaggagtgccaatggacggatgcctgcctgtctcatccctgtgcaaatggaagtacctgtaccactgtggccaaccagttctcctgcaaatgcctcacaggcttcacagggcagaaatgtgagactgatgtcaatgagtgtgacattccaggacactgccagcatggtggcacctgcctcaacctgcctggttcctaccagtgccagtgccctcagggcttcacaggccagtactgtgacagcctgtatgtgccctgtgcaccctcaccttgtgtcaatggaggcacctgtcggcagactggtgacttcacttttgagtgcaactgccttccaggttttgaagggagcacctgtgagaggaatattgatgactgccctaaccacaggtgtcagaatggaggggtttgtgtggatggggtcaacacttacaactgccgctgtcccccacaatggacaggacagttctgcacagaggatgtggatgaatgcctgctgcagcccaatgcctgtcaaaatgggggcacctgtgccaaccgcaatggaggctatggctgtgtatgtgtcaacggctggagtggagatgactgcagtgagaacattgatgattgtgccttcgcctcctgtactccaggctccacctgcatcgaccgtgtggcctccttctcttgcatgtgcccagaggggaaggcaggtctcctgtgtcatctggatgatgcatgcatcagcaatccttgccacaagggggcactgtgtgacaccaaccccctaaatgggcaatatatttgcacctgcccacaaggctacaaaggggctgactgcacagaagatgtggatgaatgtgccatggccaatagcaatccttgtgagcatgcaggaaaatgtgtgaacacggatggcgccttccactgtgagtgtctgaagggttatgcaggacctcgttgtgagatggacatcaatgagtgccattcagacccctgccagaatgatgctacctgtctggataagattggaggcttcacatgtctgtgcatgccaggtttcaaaggtgtgcattgtgaattagaaataaatgaatgtcagagcaacccttgtgtgaacaatgggcagtgtgtggataaagtcaatcgtttccagtgcctgtgtcctcctggtttcactgggccagtttgccagattgatattgatgactgttccagtactccgtgtctgaatggggcaaagtgtatcgatcacccgaatggctatgaatgccagtgtgccacaggtttcactggtgtgttgtgtgaggagaacattgacaactgtgaccccgatccttgccaccatggtcagtgtcaggatggtattgattcctacacctgcatctgcaatcccgggtacatgggcgccatctgcagtgaccagattgatgaatgttacagcagcccttgcctgaacgatggtcgctgcattgacctggtcaatggctaccagtgcaactgccagccaggcacgtcaggggttaattgtgaaattaattttgatgactgtgcaagtaacccttgtatccatggaatctgtatggatggcattaatcgctacagttgtgtctgctcaccaggattcacagggcagagatgtaacattgacattgatgagtgtgcctccaatccctgtcgcaagggtgcaacatgtatcaacggtgtgaatggtttccgctgtatatgccccgagggaccccatcaccccagctgctactcacaggtgaacgaatgcctgagcaatccctgcatccatggaaactgtactggaggtctcagtggatataagtgtctctgtgatgcaggctgggttggcatcaactgtgaagtggacaaaaatgaatgcctttcgaatccatgccagaatggaggaacttgtgacaatctggtgaatggatacaggtgtacttgcaagaagggctttaaaggctataactgccaggtgaatattgatgaatgtgcctcaaatccatgcctgaaccaaggaacctgctttgatgacataagtggctacacttgccactgtgtgctgccatacacaggcaagaattgtcagacagtattggctccctgttccccaaacccttgtgagaatgctgctgtttgcaaagagtcaccaaattttgagagttatacttgcttgtgtgctcctggctggcaaggtcagcggtgtaccattgacattgacgagtgtatctccaagccctgcatgaaccatggtctctgccataacacccagggcagctacatgtgtgaatgtccaccaggcttcagtggtatggactgtgaggaggacattgatgactgccttgccaatccttgccagaatggaggttcctgtatggatggagtgaatactttctcctgcctctgccttccgggtttcactggggataagtgccagacagacatgaatgagtgtctgagtgaaccctgtaagaatggagggacctgctctgactacgtcaacagttacacttgcaagtgccaggcaggatttgatggagtccattgtgagaacaacatcaatgagtgcactgagagctcctgtttcaatggtggcacatgtgttgatgggattaactccttctcttgcttgtgccctgtgggtttcactggatccttctgcctccatgagatcaatgaatgcagctctcatccatgcctgaatgagggaacgtgtgttgatggcctgggtacctaccgctgcagctgccccctgggctacactgggaaaaactgtcagaccctggtgaatctctgcagtcggtctccatgtaaaaacaaaggtacttgcgttcagaaaaaagcagagtcccagtgcctatgtccatctggatgggctggtgcctattgtgacgtgcccaatgtctcttgtgacatagcagcctccaggagaggtgtgcttgttgaacacttgtgccagcactcaggtgtctgcatcaatgctggcaacacgcattactgtcagtgccccctgggctatactgggagctactgtgaggagcaactcgatgagtgtgcgtccaacccctgccagcacggggcaacatgcagtgacttcattggtggatacagatgcgagtgtgtcccaggctatcagggtgtcaactgtgagtatgaagtggatgagtgccagaatcagccctgccagaatggaggcacctgtattgaccttgtgaaccatttcaagtgctcttgcccaccaggcactcggggcctactctgtgaagagaacattgatgactgtgcccggggtccccattgccttaatggtggtcagtgcatggataggattggaggctacagttgtcgctgcttgcctggctttgctggggagcgttgtgagggagacatcaacgagtgcctctccaacccctgcagctctgagggcagcctggactgtatacagctcaccaatgactacctgtgtgtttgccgtagtgcctttactggccggcactgtgaaaccttcgtcgatgtgtgtccccagatgccctgcctgaatggagggacttgtgctgtggccagtaacatgcctgatggtttcatttgccgttgtcccccgggattttccggggcaaggtgccagagcagctgtggacaagtgaaatgtaggaagggggagcagtgtgtgcacaccgcctctggaccccgctgcttctgccccagtccccgggactgcgagtcaggctgtgccagtagcccctgccagcacgggggcagctgccaccctcagcgccagcctccttattactcctgccagtgtgccccaccattctcgggtagccgctgtgaactctacacggcaccccccagcacccctcctgccacctgtctgagccagtattgtgccgacaaagctcgggatggcgtctgtgatgaggcctgcaacagccatgcctgccagtgggatgggggtgactgttctctcaccatggagaacccctgggccaactgctcctccccacttccctgctgggattatatcaacaaccagtgtgatgagctgtgcaacacggtcgagtgcctgtttgacaactttgaatgccaggggaacagcaagacatgcaagtatgacaaatactgtgcagaccacttcaaagacaaccactgtgaccaggggtgcaacagtgaggagtgtggttgggatgggctggactgtgctgctgaccaacctgagaacctggcagaaggtaccctggttattgtggtattgatgccacctgaacaactgctccaggatgctcgcagcttcttgcgggcactgggtaccctgctccacaccaacctgcgcattaagcgggactcccagggggaactcatggtgtacccctattatggtgagaagtcagctgctatgaagaaacagaggatgacacgcagatcccttcctggtgaacaagaacaggaggtggctggctctaaagtctttctggaaattgacaaccgccagtgtgttcaagactcagaccactgcttcaagaacacggatgcagcagcagctctcctggcctctcacgccatacaggggaccctgtcataccctcttgtgtctgtcgtcagtgaatccctgactccagaacgcactcagctcctctatctccttgctgttgctgttgtcatcattctgtttattattctgctgggggtaatcatggcaaaacgaaagcgtaagcatggctctctctggctgcctgaaggtttcactcttcgccgagatgcaagcaatcacaagcgtcgtgagccagtgggacaggatgctgtggggctgaaaaatctctcagtgcaagtctcagaagctaacctaattggtactggaacaagtgaacactgggtcgatgatgaagggccccagccaaagaaagtaaaggctgaagatgaggccttactctcagaagaagatgaccccattgatcgacggccatggacacagcagcaccttgaagctgcagacatccgtaggacaccatcgctggctctcacccctcctcaggcagagcaggaggtggatgtgttagatgtgaatgtccgtggcccagatggctgcaccccattgatgttggcttctctccgaggaggcagctcagatttgagtgatgaagatgaagatgcagaggactcttctgctaacatcatcacagacttggtctaccagggtgccagcctccaggcccagacagaccggactggtgagatggccctgcaccttgcagcccgctactcacgggctgatgctgccaagcgtctcctggatgcaggtgcagatgccaatgcccaggacaacatgggccgctgtccactccatgctgcagtggcagctgatgcccaaggtgtcttccagattctgattcgcaaccgagtaactgatctagatgccaggatgaatgatggtactacacccctgatcctggctgcccgcctggctgtggagggaatggtggcagaactgatcaactgccaagcggatgtgaatgcagtggatgaccatggaaaatctgctcttcactgggcagctgctgtcaataatgtggaggcaactcttttgttgttgaaaaatggggccaaccgagacatgcaggacaacaaggaagagacacctctgtttcttgctgcccgggaggggagctatgaagcagccaagatcctgttagaccattttgccaatcgagacatcacagaccatatggatcgtcttccccgggatgtggctcgggatcgcatgcaccatgacattgtgcgccttctggatgaatacaatgtgaccccaagccctccaggcaccgtgttgacttctgctctctcacctgtcatctgtgggcccaacagatctttcctcagcctgaagcacaccccaatgggcaagaagtctagacggcccagtgccaagagtaccatgcctactagcctccctaaccttgccaaggaggcaaaggatgccaagggtagtaggaggaagaagtctctgagtgagaaggtccaactgtctgagagttcagtaactttatcccctgttgattccctagaatctcctcacacgtatgtttccgacaccacatcctctccaatgattacatcccctgggatcttacaggcctcacccaaccctatgttggccactgccgcccctcctgccccagtccatgcccagcatgcactatctttttctaaccttcatgaaatgcagcctttggcacatggggccagcactgtgcttccctcagtgagccagttgctatcccaccaccacattgtgtctccaggcagtggcagtgctggaagcttgagtaggctccatccagtcccagtcccagcagattggatgaaccgcatggaggtgaatgagacccagtacaatgagatgtttggtatggtcctggctccagctgagggcacccatcctggcatagctccccagagcaggccacctgaagggaagcacataaccacccctcgggagcccttgccccccattgtgactttccagctcatccctaaaggcagtattgcccaaccagcgggggctccccagcctcagtccacctgccctccagctgttgcgggccccctgcccaccatgtaccagattccagaaatggcccgtttgcccagtgtggctttccccactgccatgatgccccagcaggacgggcaggtagctcagaccattctcccagcctatcatcctttcccagcctctgtgggcaagtaccccacacccccttcacagcacagttatgcttcctcaaatgctgctgagcgaacacccagtcacagtggtcacctccagggtgagcatccctacctgacaccatccccagagtctcctgaccagtggtcaagttcatcaccccactctgcttctgactggtcagatgtgaccaccagccctacccctgggggtgctggaggaggtcagcggggacctgggacacacatgtctgagccaccacacaacaacatgcaggtttatgcgtgagagagtccacctccagtgtagagacataactgacttttgtaaatgctgctgaggaacaaatgaaggtcatccgggagagaaatgaagaaatctctggagccagcttctagaggtaggaaagagaagatgttcttattcagataatgcaagagaagcaattcgtcagtttcactgggtatctgcaaggcttattgattattctaatctaataagacaagtttgtggaaatgcaagatgaatacaagccttgggtccatgtttactctcttctatttggagaataagatggatgcttattgaagcccagacattcttgcagcttggactgcattttaagccctgcaggcttctgccatatccatgagaagattctacactagcgtcctgttgggaattatgccctggaattctgcctgaattgacctacgcatctcctcctccttggacattcttttgtcttcatttggtgcttttggttttgcacctctccgtgattgtagccctaccagcatgttatagggcaagacctttgtgcttttgatcattctggcccatgaaagcaactttggtctcctttcccctcctgtcttcccggtatcccttggagtctcacaaggtttactttggtatggttctcagcacaaacctttcaagtatgttgtttctttggaaaatggacatactgtattgtgttctcctgcatatatcattcctggagagagaaggggagaagaatacttttcttcaacaaattttgggggcaggagatcccttcaagaggctgcaccttaatttttcttgtctgtgtgcaggtcttcatataaactttaccaggaagaagggtgtgagtttgttgtttttctgtgtatgggcctggtcagtgtaaagttttatccttgatagtctagttactatgaccctccccacttttttaaaaccagaaaaaggtttggaatgttggaatgaccaagagacaagttaactcgtgcaagagccagttacccacccacaggtccccctacttcctgccaagcattccattgactgcctgtatggaacacatttgtcccagatctgagcattctaggcctgtttcactcactcacccagcatatgaaactagtcttaactgttgagcctttcctttcatatccacagaagacactgtctcaaatgttgtacccttgccatttaggactgaactttccttagcccaagggacccagtgacagttgtcttccgtttgtcagatgatcagtctctactgattatcttgctgcttaaaggcctgctcaccaatctttctttcacaccgtgtggtccgtgttactggtatacccagtatgttctcactgaagacatggactttatatgttcaagtgcaggaattggaaagttggacttgttttctatgatccaaaacagccctataagaaggttggaaaaggaggaactatatagcagcctttgctattttctgctaccatttcttttcctctgaagcggccatgacattccctttggcaactaacgtagaaactcaacagaacattttcctttcctagagtcaccttttagatgataatggacaactatagacttgctcattgttcagactgattgcccctcacctgaatccactctctgtattcatgctcttggcaatttctttgactttcttttaagggcagaagcattttagttaattgtagataaagaatagttttcttcctcttctccttgggccagttaataattggtccatggctacactgcaacttccgtccagtgctgtgatgcccatgacacctgcaaaataagttctgcctgggcattttgtagatattaacaggtgaattcccgactcttttggtttgaatgacagttctcattccttctatggctgcaagtatgcatcagtgcttcccacttacctgatttgtctgtcggtggccccatatggaaaccctgcgtgtctgttggcataatagtttacaaatggttttttcagtcctatccaaatttattgaaccaacaaaaataattacttctgccctgagataagcagattaagtttgttcattctctgctttattctctccatgtggcaacattctgtcagcctctttcatagtgtgcaaacattttatcattctaaatggtgactctctgcccttggacccatttattattcacagatggggagaacctatctgcatggacctctgtggaccacagcgtacctgcccctttctgccctcctgctccagccccacttctgaaagtatcagctactgatccagccactggatattttatatcctcccttttccttaagcacaatgtcagaccaaattgcttgtttctttttcttggactactttaatttggatcctttgggtttggagaaagggaatgtgaaagctgtcattacagacaacaggtttcagtgatgaggaggacaacactgcctttcaaactttttactgatctcttagattttaagaactcttgaattgtgtggtatctaataaaagggaaggtaagatggataatcactttctcatttgggttctgaattggagactcagtttttatgagacacatcttttatgccatgtatagatcctcccctgctatttttggtttatttttattgttataaatgctttctttctttgactcctcttctgcctgcctttggggataggtttttttgtttgtttatttgcttcctctgttttgttttaagcatcattttcttatgtgaggtggggaagggaaaggtatgagggaaagagagtctgagaattaaaatattttagtataagcaattggctgtgatgctcaaatccattgcatcctcttattgaatttgccaatttgtaatttttgcataataaagaaccaaaggtgtaatgttttgttgagaggtggtttagggattttggccctaaccaatacattgaatgtatgatgactatttgggaggacacatttatgtacccagaggcccccactaataagtggtactatggttacttccttgtgtacatttctcttaaaagtgatattatatctgtttgtatgagaaacccagtaaccaataaaatgaccgcatattcctgactaaacgtagtaaggaaaatgcacactttgtttttacttttccgtttcattctaaaggtagttaagatgaaatttatatgaaagcatttttatcacaaaataaaaaaggtttgccaagctcagtggtgttgtattttttattttccaatactgcatccatggcctggcagtgttacctcatgatgtcataatttgctgagagagcaaattttcttttctttctgaatcccacaaagcctagcaccaaacttctttttttcttcctttaattagatcataaataaatgatcctggggaaaaagcatctgtcaaataggaaacatcacaaaactgagcactcttctgtgcactagccatagctggtgacaaacagatggttgctcagggacaaggtgccttccaatggaaatgcgaagtagttgctatagcaagaattgggaactgggatataagtcataatattaattatgctgttatgtaaatgattggtttgtaacattccttaagtgaaatttgtgtagaacttaatatacaggattataaaataatattttgtgtataaatttgttataagttcacattcatacatttatttataaagtcagtgagatatttgaacatgaaaaaaaaaa

SEQ ID NO: 49 - DNA, 1525 bp, HOMO SAPIENS
agttcccagctgtccgaaaggtcttcggaacttcggctctaaagcgttcctcagcgccatccgcccggaaacacgagcgacagagaaaaggtccgcgaggccggcagactccagagtggctgggtccgagcgcggggcgggttgccgaagggcctcggcctgggctgcgtgctggagagcggggacggggccgactcaccagaggctgcagcaacaggtccactttgctctccagtctctttctccgacaccgctgaggcggtttcccaccgacttcctttccatacagcaccggcaggcaccggtgtgaagggtcataaaaatggcgctggccgctcgtttgctaccccagttcctgcactctcggtcgctgccctgcggggccgtccgactccggactcctgctgtggccgaggtgaggctgccgtcggccacactttgctacttctgccgctgtcgcctcggcttgggagcggcgttatttccacgaagcgctagggccttggcagcctcggcgctacctgcccagggctcccggtggccagtgctcagcagcccgggactccccgcagccttcgcttctttccctgcctgccctcagcgcagctacagcacggaggagaagccccagcagcaccagaaaaccaagatgatcgtcctgggattctccaaccccatcaactgggttaggactcgaattaaggccttccttatctgggcctatttcgacaaagagttcagcatcacagagttctccgagggagcgaagcaggcttttgctcatgtatccaagttgctgtcacagtgtaaatttgatctgttggaagaacttgtggccaaagaggtgctacatgcattgaaagaaaaggttacttcactacctgacaaccataaaaatgcccttgctgctaacatagatgaaattgtatttacatcaacaggagacatctccatttactatgatgagaaaggaaggaagtttgttaacatcctgatgtgcttttggtatctaaccagtgccaacatccccagtgaaactttaagaggagccagtgtattccaggttaagttggggaatcagaatgtggaaactaaacaacttcttagtgcaagctatgagtttcagagggagttcacacaaggagtaaagcctgactggaccattgcacggattgaacactcaaaattattagaataattttcttggaaaaatcagcttatggactttagcagttgctgtgaaaaactaaggaagaaaaattttggggtcatttgatcttcacttaatctaagtctgtgaattacttttatattattttgaaatactccttgcagtatattggcatgatacagtaaaagcattttccacagattgttatcaccttctttaaaagaagtcaaaatttaaaaaatacaatagcacgttgttggtgtcatattcaataacatttccaatgctacatataattttatagacataataaagaaggtattgaaaaaactacttacaaaaaaaaaaaaaaaa

SEQ ID NO: 50 - DNA, 1248 bp, HOMO SAPIENS
ggccaagccaaagggctctcacactaagtgaagcttctccattctgtaagctttccgggaacatccaaggcaagactggcacccagcacagcagtgactgaccacataccccactctccaggacccatggagtccttcagctcaaagagcctggcactgcaagcagagaagaagctactgagtaagatggcgggtcgctctgtggctcatctcttcatagatgagacaagcagtgaggtgctagatgagctctaccgtgtgtccaaggagtacacgcacagccggccccaggcccagcgcgtgatcaaggacctgatcaaagtggccatcaaggtggctgtgctgcaccgcaatggctcctttggccccagtgagctggccctggctacccgctttcgccagaagctgcggcagggtgccatgacggcacttagctttggtgaggtagacttcaccttcgaggctgctgttctggctggcctgctgaccgagtgccgggatgtgctgctagagttggtggaacaccacctcacgcccaagtcacatggccgcatccgccacgtgtttgatcacttctctgacccaggtctgctcacggccctctatgggcctgacttcactcagcaccttggcaagatctgtgacggactcaggaagctgctagacgaagggaagctctgagagccctgagcctagcacattccaccttgacaaaatggttgactgagaaaacacagataatgggcttcctaaccctgctcacctggcactaacacttttcaatcttcaggcttcattccttcccaagagtgcttttgactctgagaccagcccacccccaaacagctagtggagaaggagcaatgctgaggggtgaggcctctctcccactccagccccaggacaggaaacagaactgcctgaaaaaggtgaagtgaaacttggatctctatttctcccataagggacttctgaaacagggaagccccctcccatgtgaaccaaggaaaggaggcacagcccagagaacccctttggggatactaaagacagaagaggggaaggtggcccttagagacagagcttggacagatgccagaggctctgttccagagtgcaggaagaaggggctagggcaggggagattctcataggggaaataaaactactaaaatatgaaaaaaaaaaaaaaaaaaaaaaaaaaaaaaaaaaaaaaaaaaaaaaaaaaaaaaaaaaaaaaaaaaaaaa

SEQ ID NO: 51 - DNA, 3541 bp, HOMO SAPIENS
ctgcaggtggccctcatgacactgacgctcttcccggtccggctcctggttgccgctgccatgatgctgctggcctggcccctcgcacttgtcgcatccctgggctctgcggagaaggaacccgagcagcccccggccctgtggaggaaggttgtggacttcctgctgaaggccatcatgcgcaccatgtggttcgccggcggcttccaccgggtggccgtgaaggggcggcaggcgctgcccaccgaggcggccatcctcacgctcgcgcctcactcgtcctacttcgacgccatccctgtgaccatgacgatgtcctccatcgtgatgaaggcagagagcagagacatcccgatctggggaactctgatccagtatatacggcctgtgttcgtgtcccggtcagaccaggattctcgcaggaaaacagtagaagaaatcaagagacgggcgcagtccaacggaaagtggccacagataatgatttttccagaaggaacttgtacaaacaggacctgcctaattaccttcaaacctggtgcattcatccctggagcgcccgtccagcctgtggttttacgatatccaaataaactggacaccatcacatggacgtggcaaggacctggagcgctggaaatcctgtggctcacgctgtgtcagtttcacaaccaagtggaaatcgagcccttctgaggaggagaagaggaaccccgcgctgtatgccagcaacgtgcggcgagtcatggccgaggccttgggtgtctccgtgactgactacacgttcgaggactgccagctggccctggcggaaggacagctccgtctccccgctgacacttgccttttagaatttgccaggctcgtgcggggcctcgggctaaaaccagaaaagcttgaaaaagatctggacagatactcagaaagagccaggatgaagggaggagagaagataggtattgcggagtttgccgcctccctggaagtccccgtttctgacttgctggaagacatgttttcactgttcgacgagagcggcagcggcgaggtggacctgcgagagtgtgtggttgccctgtctgtcgtctgccggccggcccggaccctggacaccatccagctggctttcaagatgtacggagcgcaagaggacggcagcgtcggcgaaggtgacctgtcctgcatcctcaagacggccctgggggtggcagagctcaccgtgaccgacctattccgagccattgaccaagaggagaaggggaagatcacattcgctgacttccacaggtttgcagaaatgtaccctgccttcgcagaggaatacctgtacccggatcagacacatttcgaaagctgtgcagagacctcacctgcgccaatcccaaacggcttctgtgccgatttcagcccggaaaactcagacgctgggcggaagcctgttcgcaagaagctggattaggacccagggttgcggagagacgcggcccctcccgcgtggacatcaccgccatgagcctctttgcgagtgacctctgggctccgctcctcactcctgctgtacaggcactgtcttcagcccgagttccaggggcctcgggggctgtttgtatcttgttcctttgtgaagtgtgttgcagaaccgacgcttactgtgcgagaatcggagggcgcgcacgcggatcccccgcctggcctggaccccgtggggtcaggttccctgccgggcggggggcaccggtgccgccccgtgttctcccacggggccctggtttcgagtctctgtcacagcctcttccggcggcagcgtgcaccgggcgggcctccgtgcacactcagcacacgcctgccacacagcgtgcgcttgcgtgtcactctggcacgaaacctgtctgcctctgtggatccacagcctggcagagccgagccgtcacctgatttttcagtgtttctacctgtgtgctggagctcatgagtattttataaactccatttaggtacttcaggaaacatgcagcattttttaaaaaatgaaaattgtttttctacttcatttttccttttagagtcaaaggatatttatttataggcctttttttttttaatatagaatctgaggctgtttgggctttgacttaaatttccatcaggcctctctccagcaggtaatccctctccttccgctgggtcccctggggaggtgtgaactcaagggcctagccccaaaacactttttctgcttttcttaatccttttccagtcccctctttttttataaacgttggcagtttgatgtttctgtttcggcataacgtaatccatttcactgtagcctaaactccagtccgaggttggatattgttcaaatgagcagggcccgagctggaagcgcaaggcagccgccgccgtgccgctcctcccttgccctcaggccaggtccctgctggaagcggctgcatcttcctgtcagccctggtttccatggtgactggcgtgacgcagccacctgagtatggctgaccttcctgcagagagaggagccgcagtcttttgcttgtggaaggagacgctgggctgtgcggtgcggagggtgatgaggatgtctggtgacagccgtgcggacaccactcctctctgcagcactgcctcccagcgccagggtcgcgggcacatcccactgagagcgggggtcctgccccatcttagagtcaaaggcagaggggcttccaggccctggatggggtattttggtgtcacctgaagtccctctgacatcaccttgtttcatcattttttatgacagaattagaaacccatccttcaagcacaataatcatcacagacttgagtttgcttcctaaagcaaaggctccgggtttgtttggaaaatttttttgatttctgaaatgaattgatttttatatttatttaaaaacaaccttcagctccgtttcaatcaatcacctcgacttgttttttagcatggacactgccagcaggacagacagggatggagtaaaccgaagtcaatttcagggctcttggcgtgttggacacagaagaaatcctagtgcagcctttggtagctaacagtcactgattttataattggagaatgcgtaaagattcatttttcaaggagaagagcctgcaaatggccaatgaaggaggtaaataaactaagatattccgagggaagggacccaggccacctcccttccgcaggtctgcagatgaagggttttttgaatgaaatgccactgtgcattttcagaaaaaaaaatctctgataaacagactttgaatggatgtttgttcctcctgattctcttttctcttcgtggcgacttagagttggcggatattcggaactgtgaatgtacatagcgttgagttaaaccccttgtgtgtgagacaggacgcagcgggcccctggtggcctgcggggacctgctggggtgtgagggcagagggagggttgccatgaaggaacttgggattttcaatggaataaataaaacataaagtctatacttgggaatga

SEQ ID NO: 52 - DNA, 6209 bp, HOMO SAPIENS
caacaagatggcggcggcggcggcgagcggagctggcggggctgccggggccgggactgggggagccgggcccgcgggccgcctgctgcctccgcccgcgccggggtccccagccgcccccgctgccgtgtcccctgcggccggccagccgcgtcccccagccccggcctcccgcggacccatgcccgcccgtatcggctactacgagatcgaccgcaccatcggcaagggcaacttcgcggtggtcaagcgggccacgcacctcgtcaccaaggccaaggttgctatcaagatcatagataagacccagctggatgaagaaaacttgaagaagattttccgggaagttcaaattatgaagatgctttgccacccccatatcatcaggctctaccaggttatggagacagaacggatgatttatctggtgacagaatatgctagtggaggggaaatatttgaccacctggtggcccatggtagaatggcagaaaaggaggcacgtcggaagttcaaacagatcgtcacagctgtctatttttgtcactgtcggaacattgttcatcgtgatttaaaagctgaaaatttacttctggatgccaatctgaatatcaaaatagcagattttggtttcagtaacctcttcactcctgggcagctgctgaagacctggtgtggcagccctccctatgctgcacctgaactctttgaaggaaaagaatatgatgggcccaaagtggacatctggagccttggagttgtcctctacgtgcttgtgtgcggtgccctgccatttgatggaagcacactgcagaatctgcgggcccgcgtgctgagtggaaagttccgcatcccattttttatgtccacagaatgtgagcatttgatccgccatatgttggtgttagatcccaataagcgcctctccatggagcagatctgcaagcacaagtggatgaagctaggggacgccgatcccaactttgacaggttaatagctgaatgccaacaactaaaggaagaaagacaggtggaccccctgaatgaggatgtcctcttggccatggaggacatgggactggacaaagaacagacactgcagtcattaagatcagatgcctatgatcactatagtgcaatctacagcctgctgtgtgatcgacataagagacataaaaccctgcgtctcggagcacttcctagcatgccccgagccctggcctttcaagcaccagtcaatatccaggcggagcaggcaggtactgctatgaacatcagcgttccccaggtgcagctgatcaacccagagaaccaaattgtggaggcaaccggatgggacactgaatttggacagtgatgagggtgaagagccttcccctgaagcattggtgcgctatttgtcaatgaggaggcacacagtgggtgtggctgacccacgcacggaagttatggaagatctgcagaagctcctacctggctttcctggagtcaacccccaggctccattcctgcaggtggcccctaatgtgaacttcatgcacaacctgttgcctatgcaaaacttgcaaccaaccgggcaacttgagtacaaggagcagtctctcctacagccgcccacgctacagctgttgaatggaatgggcccccttggccggagggcatcagatggaggagccaacatccaactgcatgcccagcagctgctgaagcgcccacggggaccctctccgcttgtcaccatgacaccagcagtgccagcagttacccctgtggacgaggagagctcagacggggagccagaccaggaagctgtgcagagctctacctacaaggactccaacactctgcacctccctacggagcgtttctcccctgtgcgccggttctcagatggggctgcgagcatccaggccttcaaagctcacctggaaaaaatgggcaacaacagcagcatcaaacagctgcagcaggagtgtgagcagctgcagaagatgtacggggggcagattgatgaaagaaccctggagaagacccagcagcagcatatgttataccagcaggagcagcaccatcaaattctccagcaacaaattcaagactctatctgtcctcctcagccatctccacctcttcaggctgcatgtgaaaatcagccagccctccttacccatcagctccagaggttaaggattcagccttcaagcccaccccccaaccaccccaacaaccatctcttcaggcagcccagtaatagtcctccccccatgagcagtgccatgatccagcctcacggggctgcatcttcttcccagtttcaaggcttaccttcccgcagtgcaatctttcagcagcaacctgagaactgttcctctcctcccaacgtggcactaacctgcttgggtatgcagcagcctgctcagtcacagcaggtcaccatccaagtccaagagcctgttgacatgctcagcaacatgccaggcacagctgcaggctccagtgggcgcggcatctccatcagccccagtgctggtcagatgcagatgcagcaccgtaccaacctgatggccaccctcagctatgggcaccgtcccttgtccaagcagctgagtgctgacagtgcagaggctcacagcttgaacgtgaatcggttctcccctgctaactacgaccaggcgcatttacacccccatctgttttcggaccagtcccggggttcccccagcagctacagcccttcaacaggagtggggttctctccaacccaagccctgaaagtccctccacttgaccaattccccaccttccctcccagtgcacatcagcagccgccacactataccacgtcggcactgcagcaggccctgctgtctcccacgccgccagactatacaagacaccagcaggtaccccacatccttcaaggactgctttctccccggcattcgctcaccggccactcggacatccggctgcccccaacagagtttgcacagctcattaaaaggcagcagcaacaacggcagcagcagcagcaacagcagcaacagcaagaataccaggaactgttcaggcacatgaaccaaggggatgcggggagtctggctcccagccttgggggacagagcatgacagagcgccaggctttatcttatcaaaatgctgactcttatcaccatcacaccagcccccagcatctgctacaaatcagggcacaagaatgtgtctcacaggcttcctcacccaccccgccccacgggtatgctcaccagccggcactgatgcattcagagagcatggaggaggactgctcgtgtgagggggccaaggatggcttccaagacagtaagagttcaagtacattgaccaaaggttgccatgacagccctctgctcttgagtaccggtggacctggggaccctgaatctttgctaggaactgtgagtcatgcccaagaattggggatacatccctatggtcatcagccaactgctgcattcagtaaaaataaggtgcccagcagagagcctgtcatagggaactgcatggatagaagttctccaggacaagcagtggagctgccggatcacaatgggctcgggtacccagcacgcccctccgtccatgagcaccacaggccccgggccctccagagacaccacacgatccagaacagcgacgatgcttatgtacagctggataacttgccaggaatgagtctcgtggctgggaaagcacttagctctgcccggatgtcggatgcagttctcagtcagtcttcgctcatgggcagccagcagtttcaggatggggaaaatgaggaatgtggggcaagcctgggaggtcatgagcacccagacctgagtgatggcagccagcatttaaactcctcttgctatccatctacgtgtattacagacattctgctcagctacaagcaccccgaagtctccttcagcatggagcaggcaggcgtgtaacaagaaacagagagttttgtgtacagcttgggaatgaaaaggttgattgtaaacccacagtatctagcagcgttgtgccaaattgcccttgtgtttctctccacccaaaatatcacagctgctttcctcacatttggttcatccgtgtgctgttcttttgggttctgagagggttttgccatgtttgcttgtatgaccaagtcaccaaggaaataaacaggaaggaaatccatgttctccatcttttgtgaaagtatatttgagttggtggttttttgttttgtttgggggtttgtgttttgttttgtttttggtatgttttcttccagaggtgatatactttcttttttttcttcctttcttttttttctttcgttccttttttgaaacaggagagcaaagcagttagagttcagaggccagcggcctcagggccactccctccctagccttcatcagcagagcaccctccatccccctgcattgctcttctgtgaaagcaaatactaaaggatgccatcctctggaatcctaatggcaggcaaagggagagaggaagggtgacggcttctggcacttagaaaacaaaaagaacaaaaaaagagaaacccccaagcctggaacgcagagaggtctttactgctgggatccacggaaaacatgtctgtcctagccaagatcatatgaagagtttggcacggaggctgagaatgacctggcatagatggtttgccagttaggatgtctcaatttgagcctttgcttttggtggataactcagctcccctcttgtaacctggaaagttggttgcctttatcatcctgctggttttatccatggactgaacacccaacagcagtgcactatgctttctatggcatctttcattctcattttatattgtgctataaaaaggattgtttctccatatatatattatatatgtgtgtatatatataatataatatatgtgtatatatatattatatatataatatataatatatatattatatatatattatatatataatatatatataaaatatatatatatatgctctcctctttcagcctctttgtcacagggaagaagtgtaggaggttgccttgggccctgcctctctcctaacctcctcttccccactgggtaccctcagcccctatattttaattcttgatcatgtagaaattgtttttggtaaatgttgatattattgttattatcattattaataaataaagagaaaaggaatttttgtttaaatgagaaatgtttaaccagattctgttctatttgaattgtgacttgcaccttttgttcaaagtatttcctttaggcattgtaattgtgaacagctcttacttgtgccagtgacagatgcagtggtctcctttccccagttgaagcagtgcatacgcagtagctattatttgtgttatctttatttctcttcattgttagaaaccaaagtcttctctgctggctggggctgagagagggtctgggttatctccttctgatcttcaaaacaagagagagaccttgaatacactgactcttccaccctttttttttctgggaaaggagagcaagaggtcccgagtcccctcctagtctttcatcctgaatttgcacagaggaaagcgggtgcccggcatggccatcctgatgttgctggcgggatccccatgcaccttgtccttctccactgatactggcagctcggctcctggacccaagatcccttgagtggaattctgcagtgcaagagcccttcgtgggagctgtcccatgtttccatggtccccagtctcccctccacttggtggggtcaccaactactcaccagaagggggcttaccaagaaagccctaaaaagctgttgacttatctgcgcttgttccaactcttatgcccccaacctgccctaccaccaccacgcgctcagcctgatgtgtttacatggtactgtatgtatgggagagcagactgcaccctccagcaacaacagatgaaagccagtgagcctactaaccgtgccatcttgcaaactacactttaaaaaaaactcattgctttgtattgtagtaaccaatatgtgcagtatacgttgaatgtatatgaacatactttcctatttctgttctttgaaaatgtcagaaatatttttttctttctcattttatgttgaactaaaaaggattaaaaaaaaaatctccagactcaa

SEQ ID NO: 53 - DNA, 2127 bp, HOMO SAPIENS
gggttgcaggttcagctttcacttagagacagcaactccaaattcagggtcgctggggaaactaaggcaggactggggactctgagtgagaggtcagacgctggtcgcggactctttctcccgagaactggggatagctcttccgatagcccaaagcgattcatgcggatcctagaagaaagcgccgaggtccgggcggttggccggggagagcgaagcgccgcccacgcggctgggaaagcttggggtggcgctggcgggaggtggggccgggggcgggttcctggcggagggtggggcagacgtgggttaccgggtgtgccaaccaaaccctgaacagaggaggtggcggtggtggccctcgcctgtggcccccgtgctgcttgcactcgaactcgtcgccatggaggagctccaggagcctctgagaggacagctccggctctgcttcacgcaagctgcccggactagcctcttactgctcaggctcaacgacgctgccctgcgggcgctgcaagagtgtcagcggcaacaggtacggccggtgattgctttccaaggccaccgagggtatctgagactcccaggccctggttggtcctgcctcttctccttcatagtgtcccagtgttgtcaggagggcgctggtggtagcttggaccttgtgtgccaacgcttcctcaggtctgggcctaacagcctccactgcctgggctcactcagggagcgcctcattatttgggcagccatggattctatcccagccccatcatcagttcagggacacaacctgactgaagatgccagacatcctgagagttggcagaacacaggaggctattctgaaggagatgcagtatcacagccacagatggcactagaggaggtgtcagtgtcagatccactggcaagcaaccaaggacagtcactcccaggatcctcaagggagcacatggcacagtgggaagtgagaagccagacccatgttccaaacagagaacctgttcaggcactgccttcctctgccagccggaaacgtctggacaagaaacgttcagtgcctgtagccactgtagaactggaagaaaagaggttcagaactctgcctttagtgccaagccccctacaaggcctgaccaatcaggatttacaagagggagaagattgggagcaagaagatgaggacatggaccccagattagaacacagttcctcagttcaagaagattctgaatccccaagtcctgaagatataccagactacctcctgcaatacagggccatccacagtgcagaacagcaacatgcctatgagcaggactttgagacagattatgctgaataccgcatcctgcatgcccgtgttgggactgcaagccaaaggttcatagagctgggagcagagattaaaagagttcggcgaggaactccagaatacaaggtcctggaagacaagataatccaggaatataaaaagttcaggaagcagtacccaagttacagagaagaaaagcgtcgctgtgagtaccttcaccagaaattgtcccacattaaaggtctcatcctggagtttgaggaaaagaacaggggcagctgaagttatcaagggaatttttgagcctctgcttagtgaaacacaaaggaacaaagcagctataaactaaatagaatgcaactatctgcttttcttatgctgaccactggagtccatggtggcaagtagagagctgctctaggttcttgaggtttggttttcattattaatttttagggtatgggcactgtgcaaagactccatagctgtgcctaggagtctaggaaaagtgacagaggcttggcttttttacctttagttcagccaagtcattttcaagtcctgagaaatgacatcatcttcaggataaaataatgaggacattagacaaaccaaactaagtgaattttagcctggtagcctctctaaggaaacagtaataataacttctgataagagttaaaagaacttgtagcatacctggatataatgggaaagggcctgggtgttacccatgtactgaaaatgaacttttaccaacatggctaaaaaattaaaactgactgcttctgtgtccttaaaaaaaaaaaaaa

SEQ ID NO: 54 - DNA, 2553 bp, HOMO SAPIENS
agaatcccgcgctgaagcgaagtcgagacgtttgaccttcctccgtttccgtagttccgagttgcggtttctccgttagtgcttccgggttgcagccagggaagcctccgcggtggtgcaagtggaacccaagccttgaggtttcagtgagtagggggccgacgtgagctttagcgtccccctttagcctccctcttcgattccttgaagaccctggtgcagcttagcaagagggcccaggatttttggatccccagccctgtgacaagggttcctgtccagtttccccctcccaggatttcgactcagttcagcgaagtcaccgccccgtctgagaaatgaggacaccaaggcttagagcacagccccgaggcgccgtctaccaggccccgtcccctcccccggctcctgtcggtcagcactgaaaccccgtccctgctccaggcctccttctctggggtccaaggtcccatacaggcctctgcctcggccgcaggcccttcagtcaccgtcgcctcgtctccctgactgtccgcaggcctgggcagcatggccgtattccggtcgggtctcctggtgctgacgacgccgctggcctccctagcccctcgcctggcctccatcctgacctcggcggcccggctggtgaatcacacactctatgttcacctgcagccgggcatgagcctggagggcccggctcagccccagtccagccccgtgcaggccacgtttgaggttcttgatttcatcacgcacctctatgctggcgccgacgtccacaggcacttggacgtcagaatcctactgaccaatatccgaaccaagagcacctttctccctcccctgcccacctcagtccagaatctcgcccacccgccagaagtcgtgttgacagatttccagaccctggatggaagccagtacaacccggtcaaacagcagctagtgcgttacgccaccagctgttacagctgttgtccgcgactggcctcggtgctgctatactccgattatgggataggagaagtgcccgtggagcccctggatgtccccttaccctccacgatcaggccagcttcccccgtggccgggtctccaaagcagccggtgcgtggctactaccgtggcgctgtcggtggcacgtttgaccgcctgcacaacgcccacaaggtgttgctcagtgtcgcgtgcatcctggcccaggagcagcttgtggtgggagtagcagacaaagatctgttgaagagcaagttgctccctgagctgctccaaccttatacagaacgtgtggaacatctgagtgaattcctggtggacatcaagccctccttgacttttgatgtcatccccctgctggacccctatgggcccgctggctctgacccctccctggagttcctggtggtcagcgaggagacctatcgtggggggatggccatcaaccgcttccgccttgagaatgacctggaggaacttgctttgtaccagatccagctgctgaaggacctcagacatacagagaatgaagaggacaaagtcagctcctccagcttccgccagcgaatgttggggaacctgcttcggcctccatatgaaaggccagagctccccacatgtctctatgtaattgggctgactggcatcagtggctctgggaagagctcaatagctcagcgactgaagggcctgggggcgtttgtcattgacagtgaccacctgggtcatcgggcctatgccccaggtggccctgcctaccagcctgtggtggaggcctttggaacagatattctccataaagatggcatcatcaacaggaaggtcctaggcagccgggtgtttgggaataagaagcagctgaagatactcacggacattatgtggccaattatcgcaaagctggcccgagaggagatggatcgggctgtggctgagggaaagcgtgtgtgtgtgattgatgccgctgtgttgcttgaagccggctggcagaacctggtccatgaggtgtggactgctgtcatcccagagactgaggctgtaagacgcattgtggagagggatggcctcagtgaagccgcggctcaaagccggctgcagagccagatgagcgggcagcagcttgtggaacagagccacgtggtgctcagcaccttgtgggagccgcatatcacccaacgccaggtggagaaagcctgggccctcttgcagaagcgcattcccaagactcatcaggccctcgactgaaaagttctcagtggggccagactggctcctggagctgacaagcgaccccgtggtgaggagaaatgggggccttgatgctcaccctggttcaggcccagaggtccaagctatactgtgcaggacatggccaggcctggtggacacaggaagcctacccaacacgctggtatttggccaacactgaggatgtggttcatgggggagcagtcccctccccactcttgcccatgggtgactcttacccacagctgactagggccagcgcaaatactggaacctgtaacagaattaaaggtgaatgttctgaga

SEQ ID NO: 55 - DNA, 2565 bp, HOMO SAPIENS
gtagcgcttgtgtcgacatcggcgcgcgccgagcccggaagaggcgcgggctaggaaaggagttggttcgcgcaggtgcggcgcctgggtccccatggcgctgtggcgcggctccgcgtacgcgggcttcctggcgctggccgtgggctgcgtcttcctgctggagccagagctgccaggctcggcgctgcgctctctctggagctcgctgtgtctggggcccgcgcctgcgcccccgggacccgtctcccccgagggccggttggcggcagcctgggacgcgcttatcgtgcggccagtccggcgctggcgccgcgtggcagtgggagtcaatgcatgtgttgatgtggtgctctcaggggtgaagctcttgcaggcacttggccttagtcctgggaatgggaaagatcacagcattctgcattcaaggaatgatctggaagaagccttcattcacttcatggggaagggagcagctgctgagcgcttcttcagtgataaggaaacttttcacgacattgcccaggttgcgtcagagttcccaggagcccagcactatgtaggaggaaatgcagctttaattggacagaaatttgcagccaactcagatttaaaggttcttctttgcggtccagttggtccaaagctacatgagcttcttgatgacaatgtctttgttccaccagagtcattgcaggaagtggatgagttccacctcattttagagtatcaagcaggggaggagtggggccagttaaaagctccccatgccaaccgattcatcttctctcacgacctctccaacggggccatgaatatgctggaggtgtttgtgtctagcctggaggagtttcagccagacctggtggtcctctctggattgcacatgatggagggacaaagcaaggagctccagaggaagagactcttggaggttgtaacctccatttctgacatccccactggtattccagttcacctagagctggccagtatgactaacagggagctcatgagcagcattgtccatcaggtctttcccgcggtgacttcccttgggctgaatgaacaggagctgttatttctcacccagtcagcctctggacctcactcttctctctcttcctggaacggtgttcctgatgtgggcatggtcagtgacatcctcttctggatcttgaaagaacatgggaggagtaaaagcagagcctcggatctcaccaggatccatttccacacgctggtctaccacatcctggcaactgtggatggacactgggccaaccagctggcagccgtggctgcaggagctcgtgtggctgggacacaggcctgcgccacagaaaccatagacaccagccgagtgtctctgagggcaccccaagagttcatgacttcccattcggaggcaggctccaggattgtattaaacccaaacaagccagtagtagaatggcacagagagggaatatccttccacttcacaccagtattggtgtgtaaagaccccattcgaactgtaggccttggagatgccatttcagccgaaggactcttctattcggaagtacaccctcactattaggaagattcttaggggtaatttttctgaggaaggagaactagccaacttaagaattacaggaagaaagtggtttggaagacagccaaagaaataaaagcagattaaactgtatcaggtacattccagcctgttggcaactccataaaaacatttcagattttaatccgaatttagctaatgagactggatttttgttttttatgttgtgtgtcacagagctaaaaactcagttcccaaatccccagtttatgcagcgccatcaggtattttaagctaaacttcttcacccctgagagcatgtcagctggagaaaagcagttcttccttgcccacttgagaagtgcacgcccactcacccaacatcctggtctctaggaaagcctcatgtgaggttcctctttctttcagctcagtgcccatgggcaaggatcatgatttccattccgtgttacaatgacaatatttaatgagcataaccttctcagtctcctgctctcaaatttaggacagagccgctaaggacaaaacaatccctcccgtgctttatgatggcagcaggggctggggagcctctgagggactctttcattctgcagttgtctggaagcctgggtggcgtcatgagctgaaggatcatgctttcctgtcctggctccataggttataggctggctggtgaaaggttcacgtggcccaggctgaacttcattgcctagctttggatgtgctttctgccataaagactgatttttgttcgttctgagccttcaaggaatttgttttttacaactggaatatgctcctgtgtgtgttaacagatcatggatgttttatgttttcactgatcatttaaagagtttgacctcagagctccaggatcatcagtaaatttgtcatgttatatatttatttttttataaatcaagacttctgtgtgctcttaaatatattaaaaacaatttacatttcaggaaaaaaaa

SEQ ID NO: 56 - DNA, 4205 bp, HOMO SAPIENS
acccaccgaaccccgcccgcgccgggagcatctcgcgtccccaacgggcccccgggtcggtttccgcggtggccatgactgcggccgtgttcttcggctgcgccttcattgccttcgggcctgcgctcgccctttatgtcttcaccatcgccaccgagccgttgcgtatcatcttcctcatcgccggagctttcttctggttggtgtctctactgatttcgtcccttgtttggttcatggcaagagtcattattgacaacaaagatggaccaacacagaaatatctgctgatctttggagcgtttgtctctgtctatatccaagaaatgttccgatttgcatattataaactcttaaaaaaagccagtgaaggtttgaagagtataaacccaggtgagacagcaccctctatgcgactgctggcctatgtttctggcttgggctttggaatcatgagtggagtattttcctttgtgaataccctatctgactccttggggccaggcacagtgggcattcatggagattctcctcaattcttcctttattcagctttcatgacgctggtcattatcttgctgcatgtattctggggcattgtattttttgatggctgtgagaagaaaaagtggggcatcctccttatcgttctcctgacccacctgctggtgtcagcccagaccttcataagttcttattatggaataaacctggcgtcagcatttataatcctggtgctcatgggcacctgggcattcttagctgcgggaggcagctgccgaagcctgaaactctgcctgctctgccaagacaagaactttcttctttacaaccagcgctccagataacctcagggaaccagcacttcccaaaccgcagactacatctttagaggaagcacaactgtgcctttttctgaaaatccctttttctggtggaattgagaaagaaataaaactatgcagatatgcgttccattcacttggctttcacacaactgctctccgaaaggggtgctcagtggtgtgcgtcctggctgcacgagaatcacctgggacagtgtaaagccgactgattctgggctccaccttccagagctaattggcctgggcacgtggtgagttttaaaagcttcccaggtgattctgatgtgcagccatgttgagacccactggtttggtatccaaataggagcttcctgagaacaccttaagtggatgagaatctggtctttagctgtctcctaactcaactcgtgctgagcaagtaagtatctgaatgtcaaatcctggttatcttttatcttcctaagttctgaagtcacaaaaggctaaagggctatcacccctgctcactgtttgcgtgtacttcaccatcttaggagaacacggtaggttgggcttctaaatgcaataataaattacgctgactgtggtaacttagccaaagtaagatactgattaagccgtatttttctgaagtgcttccattccaggttttgctttctgaggcattacattgtttttgagtatagattacattttattaactaaaaatgattgttttgtgacttccttgggaaggtattttaaaatcaggaatttttatgcaatgtctataagcctgtttaaagctttccatgggctctgccccaaggccgttggctgcagcgttcaccatctgagtgccagttgctggactagttgaggtgaagtgcattgttttctctctgagcagctgtgcggggagctgagtgatgtgccctgggacaggcttcactggagctggtggaagtataaccagaagcacaaggaaatgagccaaaagggtgtcattgacacttttcatttgctcctgtgatactaacaacactttcacccaaatggcttaatgtaatattggaaatagatcttaaactgccaaatctcacactattgcataatccatatgctctttagatctagtcagtgtctctgggttttggtagcagatacagcgttccctttacaggaatacccaaggtgttctttcagcttccagacaggtcctttgatttcctttataaagggaaaattctggcaaatcgtgcctttactattagaaattgttcccagttgatgtcttttggggagctggtggcatgaaatgcaaatgacctatacattaaagtgatgtctcagtgaataccatacatgcagtagaacattcagaagagaggagcagcaatcctgaggggctgggggagtgacagtggcaggacggatgggcgggtttgacagattgtggtgggaagaagaatgatcatgtttaaagctaacatagccagtgttttgggctagccacacatcattccagagaccaaaaccttactcatgaactagacctttatcgatatcagtgaacccccatgtttaaaatattagaatgtttagagataaaatagagataatagagataaaagaagaggagggcttctatcaatgctgtaaacagtctgataagcgactgtggttattcccctaaagtttacttcagcactaacactagtgcttccgctggagtttgcagttttccagctttatacaggattttcctttgactggaagagtcaaggatatagagactcaacagtgacatttattgtacaacatcaaggggaataggatactcatcaaactgggattattcttatcaaaacatggtcttctttgaataagaaaaatacatagttggttattatggacttaaaactgtgttaaatggatattctgataaaatatttgctgctctgtagagtgtggaaagtctgagaatattagctttactcatcttgagctttgaggatgttctctgtacgccgatggtttcatattaactaaaaaagctgggtattgtaaaatctcatttataaaaactcagatgagaagaaaattttctttgatggtgagactgttgtcttagttcaggaaattatttaataatcctttgttacctgtgaatgaaggaactttgtaattctgatttatcgtaaaacatgagcctttccagagtcagcttagacactgttgtcgcaaatagccatgctttgccttatgccaaggaggcccagagggagggcctagtcttcctctgttgctgtacatatattgaaatgcttttttttttttattttgcatttgttatctataatgagctttctgagccctgatattatgtgagacaaacaggagttattgatgttatacactcccttccattcaggattttctgcttggagggaaatatgttgaccttagagaattgtgaatattgttgcaattcttgaatatattaccatgtgaataatagagactgtgttgctctctagtataagctatatttatttttgattcatttgaattactagttataactggagaaattttgttacctctatcctggcttgcctgactggctgtataatagcagcagcctcttttagagcatcttaatgaaaacatggatgaaaggaattaatgatgatatctgcagactgcgtagaaaatggcttttgttcccagcgttaacattttcttctcaatcacatttcaatgtttgtggagagtggcagattcacaccagaaacactaggtgttcatatccatagcatggatgcagaataagcagttgggagagaagcttcttcctacctggtactcctcccattcacctcagcccagccccagacaggcgttagcattcagtgtgggccctcaggcagccctgaagcctggctgggtcatcagatgggggcagcctgtgacgggcaccagcggcctgattccagggaagagttcctggagggtgttggctgtttttgttagctcagtttttttctgggctccaccattcctaactccaggtagacaagatagatgtcacacacaacaattttaaagtattttgcttagtgcattttgtttatgattgcagtgtttgtttcttatttaataggctttttacttcattctattaaattttagtgtttagaagaggcgggtactgtcactgtgtaaaatatgtaatattttatatgttataccatgtcatatatacttgcaatatcagaccttgcattcaatatacaatgcaattgactctttgcagacctgcatttttcagtgaacaataaaaagattgtctggcactcctcaaaaaaaaaaaaa

SEQ ID NO: 57 - DNA, 858 bp, HOMO SAPIENS
gacaggaagagaaggaaaaaagagaaggcgctgtcccgctcttgctacggtggcctggaggagtggcgaaaccggaacagagaatttatcacttctgggactcacagtcgtgatgtctttcaagagggaaggagacgattggagtcaactcaatgtgctcaaaaaaagaagagtcggggacctcctagccagttacattccagaggatgaggcgctgatgcttcgggatggacgctttgcttgtgccatctgcccccatcgaccggtactggacaccctggccatgctgactgcccaccgtgcaggcaagaaacatctgtccagcttgcagcttttctatggcaagaagcagccgggaaaggaaagaaagcagaatccaaaacatcagaatgaattgagaagggaagaaaccaaagctgaggctcctctgctaactcagacacgacttatcacccagagtgctctgcacagagctccccactataacagttgctgccgccggaagtacagaccagaagcccctggtccctctgtctccctttcccctatgccaccctcagaggtcaaactccaaagtgggaagatcagtagggaacctgaacctgcggctggcccacaggccgaggagtcagcaactgtctcagcccctgcacccatgagccccacaagaagacgagccctggaccattatctcacccttcgaagctctggatggatcccagatggacgaggtcgatgggtaaaagatgaaaatgttgagtttgactctgatgaggaggaaccacctgatctccccttggactgatacccttttcccattcattcacaaataaattacaatgggtgctgagaacttaa

SEQ ID NO: 58 - DNA, 3635 bp, HOMO SAPIENS
gctttgggcgggaccctgcagaggcggcggggctcctcctcccgctcctcctcggcctccccttcgggcgctctcgcgctaactgtgctcctccggggccctccgcctgctcccagccatggtggcctggcgctcggcgttccttgtctgcctcgctttctccttggccaccctggtccagcgaggatctggggactttgatgattttaacctggaggatgcagtgaaagaaacttcctcagtaaagcagccatgggaccacaccaccaccaccacaaccaataggccaggaaccaccagagctccggcaaaacctccaggtagtggattggacttggctgatgctttggatgatcaagatgatggccgcaggaaaccgggtataggaggaagagagagatggaaccatgtaaccaccacgaccaagaggccagtaaccaccagagctccagcaaatactttaggaaatgattttgacttggctgatgccctggatgatcgaaatgatcgagatgatggccgcaggaaaccaattgctggaggaggaggtttttcagacaaggatcttgaagacatagtagggggtggagaatacaaacctgacaagggtaaaggtgatggccggtacggcagcaatgacgaccctggatctggcatggtggcagagcctggcaccattgccggggtggccagcgccctggccatggccctcatcggtgccgtctccagctacatctcctaccagcagaagaagttctgcttcagcattcagcagggtctcaacgcagactacgtgaagggagagaacctggaagccgtggtatgtgaggaaccccaagtgaaatactccacgttgcacacgcagtctgcagagccgccgccgccgcccgaaccagcccggatctgagggccctgtccagctgcaggcatgcacaatggtgccaccgcttgtcacccggctccccccaccccttcatttggacccgcagctgctgtgctgctctgtgccatcggctccttgttggtctgagtttcccggatgagctctgggtgtttgtgagtttggtttctctgccctgccccaagcgtgctgagacttggtgccgaaattcaagagccagctctgatagaaagccagcaccagcctcgggagctgctgagccaccaactcccaaagccagcctgcctccagctttactgagcacaggatgcgggggccaagatgatgctgaggcctgatgacatttatgcttaggggacaagagtttgaactcaagggactgtgacccctgcacactggagtggctcattgtggcaggtttctgccaatagacagcccctgacagtggcctcaaggagctgcaggtggggggctcagcctgcacccacttggagcccctgcaaggagcgaaccggtcagcaccaagtaacaccacacacacgcagcacccaggatgatggtttcacttcagtcttccccatcccaggttttatgttgctgggcttccggagagccggtccaagcggaggctttcagtgatttaagtacaaacatgcatctcgtgatagtcctgccttgagagcttaggaatcttccggataagtatgaagcaattcgtaggcctgtttcccatctgattccatagggggctgggtgtggccttcgggttgacatgagaaaggtctttagcaatcatttctgcaccggagatgagttttatcctgtgttggggagaggtgctcaccctccaccctgtgtccctgttttggtagcaagagtgaccgatgtcaagaacgagcatcaaagccagaatcctgcttgtttgcttaaaaatgtaattgggggcggcgggggaggagaggggaaagagacattcgcttggtttagtgaaacgcaggtgactttgtagctctgtggtcagcctacttgtctgctctgagggagagtgcgtggggagccatgctcaccgtggcaaacacaggaaccccatgactcgcccctcacctggcgtggagctgcctggtttgggctggagcagagctggtttcctggaatgttcctttggcccacatatggttctgtcccggtgagctctgttgtcagaggctcacgggacagaaccacatgctagggtctagggcccctgtctactgatagtcagtttgctgtgtcagaaagcacttctgaaagcagatatgagtcaccagacaggcaggatcttacaaaactcacgggcctctttggtctgcatgatggccccatgcgtttcataggctgtccactgagcgggattgtctgctgagtgggatgagccaactccagtttcttaaggaaaccactggaatctgcagcccccacatgcatctgtctaacgcatgcctcgtgttcgttttgcaaacatgcctgtggtggagggtggtcagttgtagccctgtgcgtctcaaggctgccttgtgaggccattcccagtgcgtgcccttgagctccttaccaccccttttcctgctcggccctttaatccctgacagacctggactgtgtggctgaagggggacctgcagcactgcagaaatgcctctgcgtggtgccatgaaggaaagaaaccttggcctggtctcgagaagcttcccatgcttcaggaagttagtaagggtggggtggcttgcaggattggcctgtttccagggcctcccacactcattggccagattgtgaactttgtcaggcttgtccctccctgataccaagtatgtcgagaaccgatggccccaccctctggctggtgctgggccggaggtggctatggaggattttggcatgcgtggcctgtcgccacctggacagcgtgacctcaggggttgtccactttacctttatggtgaggcctgtcggatggctaagtccttgaaaccctagagctgtgacgtagaatatgtgctgtctgtgagaccgtgttcccaggagcactgactgcagttgagagagacccattttgctctcccttaccgccccccgccccgggtgctttctgcacaaagcctagagcctggcactcaagcccaccggtggcagctcctagtgactggacatgcctggaagacccctcagccttctgtttgcagaacgttcatttcaggagcttctccttcccacagacatcttacacttgctcgacactgccacctgcagaagcctggcgggctctggtcaccatgtgtctatctgaaggttgcactggccagcatgggcctgtcccaagcgagaggggagacacagtggactgaaaggactggttgaaagtggccaatctctatcagcttaatttggcagagaaaatttgtaacaactctgagcacatgctgggtgaagtcacagctcaaggaaagataaagctgggcggaaggaggtgtgcgtggcttctggggtgggacccagaggggaggctctgggacaggggctggggttcagtgccagggccctgaggaagaaatggggactgatctcaaaattccagaattccctgtacatctgttcacgtgcttgtgtccaggtgtgacttgtaaactgtctagtgtttgcattaaataaaatggcaccgagcagaaaaaaaaaaaaaaaaaaaaaaaaaaaaaaa

SEQ ID NO: 59 - DNA, 3641 bp, HOMO SAPIENS
ggcctgaccacgcagttcttgggtctgtgctgctggcctggggttgtggttgaggccgggtctccgctcctgtgcccgggaagatggtgctaggtggttgcccggttagttacttacttctgtgcggccaggcggctttgctgctggggaatttacttctgctgcattgtgtgtctcggagccactcgcaaaatgcgaccgctgagcctgagctcacatccgctggcgccgcccagccggagggccccgggggtgctgcgagctgggaatatggcgacccccactctccggtcatcctctgctcttacctaatcacgccattttttaacatctctttttgatcaaacaagaaaaggcatttgggaaatgcaaagaggactgagaatactttggcttaaattttgcccccagaatcttgttgtttgcctactgaagagatgaaaccatggcagaagtagaatccttatagaaacaggaccagaaacacctcccttctccaacaaaaggttcattttggtggctgtccgtttgacctgctgtgcttcagtttaattggcttggaaaggggtcagcagggtgaaaccgaaccccagaaaacttgatgaagaaatgtcttttgcccgttttgattacgtgcatgcaaacagcgatttgcaaagaccgtatgatgatgatcatgatcttactggtgaattacagacctgatgaatttatagaatgtgaagacccagtggatcatgttggaaatgcaactgcatcccaggaacttggttatggttgtctcaagttcggcggtcaggcctacagcgacgtggaacacacttcagtccagtgccatgccttagatggaattgagtgtgccagtcctaggacctttctacgagaaaataaaccttgtataaagtataccggacactacttcataaccactttactctactccttcttcctgggatgttttggtgtggatcgattctgtttgggacacactggcactgcagtagggaagctgttgacgcttggaggacttgggatttggtggtttgttgaccttattttgctaattactggagggctgatgccaagtgatggcagcaactggtgcactgtttactaagaagagctgccatcatggcccagggaggcgggtgaaagctccgtcttctgaattcatctctacaggctcaaaactcctctttgatatcagacctgatgttattttccttcttttggagggcatttgtttggttaagaaggcttctttggactttggaatttcaacccagattttaccttgcagacggaatgacaagcaaaaagtgttgtggggaatcaaatttgttcctttcctcatgcacaaaacataaaggatagtggcgagtttacaagctgtggatgggtttccatagtcttcctttctgtacattgctatatcttcagtcctttggagcaagtggacctaacaagttgagcaaaatgaatatttggatccatgttcctcttgtgaccctgagtcttcatgcaaggagatctgaagctgaacaatgaaaatcttcagcagaaatagaaatggccgtggattgtaatacacactgaaattctgactttctgaatttaaatgtagaataaattttaccaacttggagtactgtatgagtattttcagtagggggaataaactcaaaattatatttgttttgcagaaacctagtcatttgaaatgagccatcctattaagccctcttttgtctccattatgttccagaggcagtatatgcagtgcaataattttttcattccacttatgttttgaaagccagcggcatcagatgtgtgagttgagctattcctcctggcagaattgtccaatctaaaaatcagcgtttaccagcccatgctaataaaattaagatttcatacaagtttctgtaaaactattcttcatgattagctctccctgtgggctgcagcagtcagaaagagataacagccacacctctgcattccccggtcaccaggaataaaaggaaatgttccagattgtaagtggttttaaaaactcagttctcatcgtttgcaatctaagttgaaagaactattaaatataaaatcaaaggtgggcaatgtggccaagtcaatggaagaggctttactcagaataacttacaaattctagaaacaaggtagaactcactcagtttacctaataataattgaatttaagaccaaatatcacagttgaaataacttccctggatacattctatcattttgtagctttcctaagaatttcttgctttatcattcctgattaatcactgtttttacattattaaaggtggcaattttctgtaaaaaatttaaaacagatgatcctattctgtcttgaaagttctgtaccacactgaccttaaccttgcttataacataacaattggtaaacttttaattcataatctttataccctaagatagtatttattaaatttttatgggtcatgaagaaactagaccctctccccagaaaaatctacatacacagaatttacatagaacttgggttcatctacacaatttatgcatgaaataaaattgtactggtaccctataaatttatacaaataaaagagtttaagggagttcaaggatgccatatgtatattttaaaaaaatttctaagggaagtctaaaaaacataaattataatattacccaaaataagatgctacttttcacctaaccaagtcctgcctcatttcacactttaacctcctaagtatattcataaccctaccaaaagttgttttctttaaaaaataagaaactttagggccagcgcaatggtgcaagcctgtaatccctgcactttgggaggccgaggcaggtgaatcctttaaggtcaggagttcgagaccagcctggccaacatggtgagacacactcccccacccccgcccagtctctagtaaaaatgcaaaaattagccgggcgtggtggcgtgcacctgtaatcccagctactcgggaggctgaggtaagagaatcacttgaactgaggaggcagagattgcagtgagccgagatcctgccactgcacttcagcctgggcaacagagtgagactctgaccaaaaaagaaattttgcagctccaaggcttgaagtcatttatgttgccaggggtaagagcttggttgaagggctaaaagactagaaactactgaagatgcccttcttactgtcagtaaagctgctggagacaaaagaagttgttctcgctgctagagtggtaatttgagaatcatcagtattcctatgtgacaatccaaaattactggttttcatttgacttgtaaatgacacccatcatccatctgcccacaaacctggccaaatgtgatacaacctgaaaacctgatggactaaaggagtactatttaacaattgattgcctttgcactttattcaggttgtttcttaaattttggtagacagatccatttgtatatgtgtgtgttatatctagtttatggctatagagaaggtttaaaatactacagtgtccttccctcaaggttaaattagaagctgcctgccttttagttgtttcttgcctttaataaaatgttatcagttcccccaga

SEQ ID NO: 60 - DNA, 5779 bp, HOMO SAPIENS
ggagaggccgccgcggtgctgagggggaggggagccggcgagcgcgcgcgcagcgggggcgcgggtggcgcgcgtgtgtgtgaagggggggcggtggccgaggcgggcgggcgcgcgcgcgaggcttcccctcgtttggcggcggcggcggcttctttgtttcgtgaagagaagcgagacgcccattctgcccccggccccgcgcggaggggcgggggaggcgccgggaagtcgacggcgccggcggctcctgcgtctcgcccttttgcccaggctagagtgcagtggtgcggtcatggttcactgcagcctcaacctcctggactcagcaggaggccactgtctgcagctcccgtgaagatgtccactccagacccacccctgggcggaactcctcggccaggtccttccccgggccctggcccttcccctggagccatgctgggccctagcccgggtccctcgccgggctccgcccacagcatgatggggcccagcccagggccgccctcagcaggacaccccatccccacccaggggcctggagggtaccctcaggacaacatgcaccagatgcacaagcccatggagtccatgcatgagaagggcatgtcggacgacccgcgctacaaccagatgaaaggaatggggatgcggtcagggggccatgctgggatggggcccccgcccagccccatggaccagcactcccaaggttacccctcgcccctgggtggctctgagcatgcctctagtccagttccagccagtggcccgtcttcggggccccagatgtcttccgggccaggaggtgccccgctggatggtgctgacccccaggccttggggcagcagaaccggggcccaaccccatttaaccagaaccagctgcaccagctcagagctcagatcatggcctacaagatgctggccagggggcagcccctccccgaccacctgcagatggcggtgcagggcaagcggccgatgcccgggatgcagcagcagatgccaacgctacctccaccctcggtgtccgcaacaggacccggccctggccctggccctggccccggcccgggtcccggcccggcacctccaaattacagcaggcctcatggtatgggagggcccaacatgcctcccccaggaccctcgggcgtgccccccgggatgccaggccagcctcctggagggcctcccaagccctggcctgaaggacccatggcgaatgctgctgcccccacgagcacccctcagaagctgattcccccgcagccaacgggccgcccttcccccgcgccccctgccgtcccacccgccgcctcgcccgtgatgccaccgcagacccagtcccccgggcagccggcccagcccgcgcccatggtgccactgcaccagaagcagagccgcatcacccccatccagaagccgcggggcctcgaccctgtggagatcctgcaggagcgcgagtacaggctgcaggctcgcatcgcacaccgaattcaggaacttgaaaaccttcccgggtccctggccggggatttgcgaaccaaagcgaccattgagctcaaggccctcaggctgctgaacttccagaggcagctgcgccaggaggtggtggtgtgcatgcggagggacacagcgctggagacagccctcaatgctaaggcctacaagcgcagcaagcgccagtccctgcgcgaggcccgcatcactgagaagctggagaagcagcagaagatcgagcaggagcgcaagcgccggcagaagcaccaggaatacctcaatagcattctccagcatgccaaggatttcaaggaatatcacagatccgtcacaggcaaaatccagaagctgaccaaggcagtggccacgtaccatgccaacacggagcgggagcagaagaaagagaacgagcggatcgagaaggagcgcatgcggaggctcatggctgaagatgaggaggggtaccgcaagctcatcgaccagaagaaggacaagcgcctggcctacctcttgcagcagacagacgagtacgtggctaacctcacggagctggtgcggcagcacaaggctgcccaggtcgccaaggagaaaaagaagaaaaagaaaaagaagaaggcagaaaatgcagaaggacagacgcctgccattgggccggatggcgagcctctggacgagaccagccagatgagcgacctcccggtgaaggtgatccacgtggagagtgggaagatcctcacaggcacagatgcccccaaagccgggcagctggaggcctggctcgagatgaacccggggtatgaagtagctccgaggtctgatagtgaagaaagtggctcagaagaagaggaagaggaggaggaggaagagcagccgcaggcagcacagcctcccaccctgcccgtggaggagaagaagaagattccagatccagacagcgatgacgtctctgaggtggacgcgcggcacatcattgagaatgccaagcaagatgtcgatgatgaatatggcgtgtcccaggcccttgcacgtggcctgcagtcctactatgccgtggcccatgctgtcactgagagagtggacaagcagtcagcgcttatggtcaatggtgtcctcaaacagtaccagatcaaaggtttggagtggctggtgtccctgtacaacaacaacctgaacggcatcctggccgacgagatgggcctggggaagaccatccagaccatcgcgctcatcacgtacctcatggagcacaaacgcatcaatgggcccttcctcatcatcgtgcctctctcaacgctgtccaactgggcgtacgagtttgacaagtgggccccctccgtggtgaaggtgtcttacaagggatccccagcagcaagacgggcctttgtcccccagctccggagtgggaagttcaacgtcttgctgacgacgtacgagtacatcatcaaagacaagcacatcctcgccaagatccgttggaagtacatgattgtggacgaaggtcaccgcatgaagaaccaccactgcaagctgacgcaggtgctcaacacgcactatgtggcaccccgccgcctgctgctgacgggcacaccgctgcagaacaagcttcccgagctctgggcgctgctcaacttcctgctgcccaccatcttcaagagctgcagcaccttcgagcagtggtttaacgcaccctttgccatgaccggggaaaaggtggacctgaatgaggaggaaaccattctcatcatccggcgtctccacaaagtgctgcggcccttcttgctccgacgactcaagaaggaagtcgaggcccagttgcccgaaaaggtggagtacgtcatcaagtgcgacatgtctgcgctgcagcgagtgctctaccgccacatgcaggccaagggcgtgctgctgactgatggctccgagaaggacaagaagggcaaaggcggcaccaagaccctgatgaacaccatcatgcagctgcggaagatctgcaaccacccctacatgttccagcacatcgaggagtccttttccgagcacttggggttcactggcggcattgtccaagggctggacctgtaccgagcctcgggtaaatttgagcttcttgatagaattcttcccaaactccgagcaaccaaccacaaagtgctgctgttctgccaaatgacctccctcatgaccatcatggaagattactttgcgtatcgcggctttaaatacctcaggcttgatggaaccacgaaggcggaggaccggggcatgctgctgaaaaccttcaacgagcccggctctgagtacttcatcttcctgctcagcacccgggctggggggctcggcctgaacctccagtcggcagacactgtgatcatttttgacagcgactggaatcctcaccaggacctgcaagcgcaggaccgagcccaccgcatcgggcagcagaacgaggtgcgtgtgctccgcctctgcaccgtcaacagcgtggaggagaagatcctagctgcagccaagtacaagctcaacgtggaccagaaggtgatccaggccggcatgttcgaccagaagtcctccagccatgagcggcgcgccttcctgcaggccatcctggagcacgaggagcaggatgagagcagacactgcagcacgggcagcggcagtgccagcttcgcccacactgcccctccgccagcgggcgtcaaccccgacttggaggagccacctctaaaggaggaagacgaggtgcccgacgacgagaccgtcaaccagatgatcgcccggcacgaggaggagtttgatctgttcatgcgcatggacctggaccgcaggcgcgaggaggcccgcaaccccaagcggaagccgcgcctcatggaggaggacgagctcccctcgtggatcatcaaggacgacgcggaggtggagcggctgacctgtgaggaggaggaggagaagatgttcggccgtggctcccgccaccgcaaggaggtggactacagcgactcactgacggagaagcagtggctcaaggccatcgaggagggcacgctggaggagatcgaagaggaggtccggcagaagaaatcatcacggaagcgcaagcgagacagcgacgccggctcctccaccccgaccaccagcacccgcagccgcgacaaggacgacgagagcaagaagcagaagaagcgcgggcggccgcctgccgagaaactctcccctaacccacccaacctcaccaagaagatgaagaagattgtggatgccgtgatcaagtacaaggacagcagcagtggacgtcagctcagcgaggtcttcatccagctgccctcgcgaaaggagctgcccgagtactacgagctcatccgcaagcccgtggacttcaagaagataaaggagcgcattcgcaaccacaagtaccgcagcctcaacgacctagagaaggacgtcatgctcctgtgccagaacgcacagaccttcaacctggagggctccctgatctatgaagactccatcgtcttgcagtcggtcttcaccagcgtgcggcagaaaatcgagaaggaggatgacagtgaaggcgaggagagtgaggaggaggaagagggcgaggaggaaggctccgaatccgaatctcggtccgtcaaagtgaagatcaagcttggccggaaggagaaggcacaggaccggctgaagggcggccggcggcggccgagccgagggtcccgagccaagccggtcgtgagtgacgatgacagtgaggaggaacaagaggaggaccgctcaggaagtggcagcgaagaagactgagccccgacattccagtctcgaccccgagcccctcgttccagagctgagatggcataggccttagcagtaacgggtagcagcagatgtagtttcagacttggagtaaaactgtataaacaaaagaatcttccatatttatacagcagagaagctgtaggactgtttgtgactggccctgtcctggcatcagtagcatctgtaacagcattaactgtcttaaagagagagagagagaattccgaattggggaacacacgatacctgtttttcttttccgttgctggcagtactgttgcgccgcagtttggagtcactgtagttaagtgtggatgcatgtgcgtcaccgtccactcctcctactgtattttattggacaggtcagactcgccgggggcccggcgagggtatgtcagtgtcactggatgtcaaacagtaataaattaaaccaacaacaaaacgcacagccaaaaaaaaa

SEQ ID NO: 61 - DNA, 2474 bp, HOMO SAPIENS
cgggccgggggtcgcctcccgcctcccgcctcccgcctcccgccgcccgccgcccgcgtcgccctcgccgccgttgggccgcgccgcgccgccatgtcgggccccggaccgcgggagccgccgccggaggcaggcgcggcaggcggcgaggcggccgtcgagggcgcgggcggcggggacgcggcgctgggcgagccggggctgagcttcacgaccaccgacctgagcctggtggagatgacggaggtggagtacacgcagctgcagcacatcctctgctcgcacatggaggcggcggctgacggcgagctcgagacgcgcctcaactcggcgctgctggcggcggcgggcccgggcgcaggcgcgggcggcttcgcggcgggcggtcaggggggcgcggcgcccgtgtaccccgtgctgtgcccgtccgcgctggcggccgacgcgccctgcctgggccacatcgacttccaggagctgcgcatgatgctgctaagcgaggcgggcgcggcggagaagacgtcgggcggcggggacggagcgagggcccgggccgacggcgccgccaaggagggcgcgggcgcggctgcggctgcggctggacccgacggcgcgcccgaggcccgggccaagccggccgtgcgcgtccgcctggaggaccgcttcaacagcatccccgccgagccgccgcccgcgccgcgcggccccgagccccccgagccgggcggggcgctcaacaatttggtaactctcattcgacatccatctgaactaatgaatgttcctcttcagcaacaaaacaaatgtacagcattagtgaaaaataaaactgcggctacaactactgctttgcaatttacatacccactgtttactacaaatgcttgctctactagtggaaattctaatctttcacagacacagagttctagtaactcatgttctgtacttgaagctgccaagcaccaggatattggattgcctagagcattttctttctgttatcagcaagaaattgaatccactaaacagacgttaggtagtagaaacaaagttttgcctgagcaagtttggattaaagtgggagaagcagcgctatgcaaacaagcactgaagaggaatcggagtagaatgcgtcagttggacacaaatgtagagcgaagagcccttggagagattcagaatgtgggcgaaggtgccaccgccacacaaggcgcttggcagtcctcggagtcctcacaggcaaacctgggggagcaggcccagagtgggccccagggaggaaggtctcaacgtagggagaggcataaccgaatggaaagagatagaaggcgcagaatccgcatttgctgtgatgagttgaatctcttagtgccgttctgcaatgccgagactgacaaggccacaactctgcagtggaccacagcattcctgaaatacatccaggaaagacatggagattctcttaaaaaggaatttgagagcgtattttgcggtaaaactggccgaaggctaaagctgaccagaccggactccttggtgacctgtcctgcacaggggagtttacagagcagcccctcgatggagatcaagtgatcggactgaacaggaatcctcggggggtgaacagccattccttcgtgacctgtgcacgccttctgcaaccctggagctctgctcggctagtctgactcgaaaagggcgtgactcaagctgacgggactccagtagggactttgagagcacattttgtaaaaatatttatctagacgcaaatgcttatccatgaatgtcctcttagaccatttggggatgaagccatcttaataattagtaataattaattagtaataattagtaagcattttctcaatgctctgattccatcatgttttcttaacatgataacttaaaaaattgacatcctttgtactttctttaatcttaaaaagtacacggctttttacttatttaccttttaaatatgcccctttagcaattggaacaagttaaattgttaactaaaaacagtttggaaattttatttcattcgttatatcacacccccttgtcatgactctgagtcacgtgctgctgtattgcaacgtgcaggaccattttaaacctgtgtgctaaaaattttccagatacttgctttaaagctacttttgtccacaaatgaaatactgtcacagtagacgcttaaatgccacgttttcataccaagagtcattcattacttcatgtgtcacaaactgtggtgtttggaattgggtttttcaatgagtggctttacttatcaatcacaacaggtaatagcaatagacgttagtgcaatacaaagtcaccctcaataaatactgttaattggagatgtgagtttgtacacaaaacatcagactagacctttgtatgggagagaatttactgtacattaaattctttattttttgttaaaaaaaaaaaaaaaaaaa

SEQ ID NO: 62 - DNA, 14905 bp, HOMO SAPIENS
cagcggtgcgagctccaggcccatgcactgaggaggcggaaacaaggggagcccccagagctccatcaagccccctccaaaggctcccctacccggtccacgccccccaccccccctccccgcctcctcccaattgtgcatttttgcagccggaggcggctccgagatggggctgtgagcttcgcccggggagggggaaagagcagcgaggagtgaagcgggggggtggggtgaagggtttggatttcggggcagggggcgcacccccgtcagcaggccctccccaaggggctcggaactctacctcttcacccacgcccctggtgcgctttgccgaaggaaagaataagaacagagaaggaggagggggaaaggaggaaaagggggaccccccaactggggggggtgaaggagagaagtagcaggaccagaggggaaggggctgctgcttgcatcagcccacaccatgctgaccccgccgttgctcctgctgctgcccctgctctcagctctggtcgcggcggctatcgacgcccctaagacttgcagccccaagcagtttgcctgcagagatcaaataacctgtatctcaaagggctggcggtgcgacggtgagagggactgcccagacggatctgacgaggcccctgagatttgtccacagagtaaggcccagcgatgccagccaaacgagcataactgcctgggtactgagctgtgtgttcccatgtcccgcctctgcaatggggtccaggactgcatggacggctcagatgaggggccccactgccgagagctccaaggcaactgctctcgcctgggctgccagcaccattgtgtccccacactcgatgggcccacctgctactgcaacagcagctttcagcttcaggcagatggcaagacctgcaaagattttgatgagtgctcagtgtacggcacctgcagccagctatgcaccaacacagacggctccttcatatgtggctgtgttgaaggatacctcctgcagccggataaccgctcctgcaaggccaagaacgagccagtagaccggccccctgtgctgttgatagccaactcccagaacatcttggccacgtacctgagtggggcccaggtgtctaccatcacacctacgagcacgcggcagaccacagccatggacttcagctatgccaacgagaccgtatgctgggtgcatgttggggacagtgctgctcagacgcagctcaagtgtgcccgcatgcctggcctaaagggcttcgtggatgagcacaccatcaacatctccctcagtctgcaccacgtggaacagatggccatcgactggctgacaggcaacttctactttgtggatgacatcgatgataggatctttgtctgcaacagaaatggggacacatgtgtcacattgctagacctggaactctacaaccccaagggcattgccctggaccctgccatggggaaggtgtttttcactgactatgggcagatcccaaaggtggaacgctgtgacatggatgggcagaaccgcaccaagctcgtcgacagcaagattgtgtttcctcatggcatcacgctggacctggtcagccgccttgtctactgggcagatgcctatctggactatattgaagtggtggactatgagggcaagggccgccagaccatcatccagggcatcctgattgagcacctgtacggcctgactgtgtttgagaattatctctatgccaccaactcggacaatgccaatgcccagcagaagacgagtgtgatccgtgtgaaccgctttaacagcaccgagtaccaggttgtcacccgggtggacaagggtggtgccctccacatctaccaccagaggcgtcagccccgagtgaggagccatgcctgtgaaaacgaccagtatgggaagccgggtggctgctctgacatctgcctgctggccaacagccacaaggcgcggacctgccgctgccgttccggcttcagcctgggcagtgacgggaagtcatgcaagaagccggagcatgagctgttcctcgtgtatggcaagggccggccaggcatcatccggggcatggatatgggggccaaggtcccggatgagcacatgatccccattgaaaacctcatgaacccccgagccctggacttccacgctgagaccggcttcatctactttgccgacaccaccagctacctcattggccgccagaagattgatggcactgagcgggagaccatcctgaaggacggcatccacaatgtggagggtgtggccgtggactggatgggagacaatctgtactggacggacgatgggcccaaaaagacaatcagcgtggccaggctggagaaagctgctcagacccgcaagactttaatcgagggcaaaatgacacaccccagggctattgtggtggatccactcaatgggtggatgtactggacagactgggaggaggaccccaaggacagtcggcgtgggcggctggagagggcgtggatggatggctcacaccgagacatctttgtcacctccaagacagtgctttggcccaatgggctaagcctggacatcccggctgggcgcctctactgggtggatgccttctacgaccgcatcgagacgatactgctcaatggcacagaccggaagattgtgtatgaaggtcctgagctgaaccacgcctttggcctgtgtcaccatggcaactacctcttctggactgagtatcggagtggcagtgtctaccgcttggaacggggtgtaggaggcgcaccccccactgtgacccttctgcgcagtgagcggccccccatctttgagatccgaatgtatgatgcccagcagcagcaagttggcaccaacaaatgccgggtgaacaatggcggctgcagcagcctgtgcttggccacccctgggagccgccagtgcgcctgtgctgaggaccaggtgttggacgcagacggcgtcacttgcttggcgaacccatcctacgtgcctccaccccagtgccagccaggcgagtttgcctgtgccaacagccgctgcatccaggagcgctggaagtgtgacggagacaacgattgcctggacaacagtgatgaggccccagccctctgccatcagcacacctgcccctcggaccgattcaagtgcgagaacaaccggtgcatccccaaccgctggctctgcgacggggacaatgactgtgggaacagtgaagatgagtccaatgccacttgttcagcccgcacctgcccccccaaccagttctcctgtgccagtggccgctgcatccccatctcctggacgtgtgatctggatgacgactgtggggaccgctctgatgagtctgcttcgtgtgcctatcccacctgcttccccctgactcagtttacctgcaacaatggcagatgtatcaacatcaactggagatgcgacaatgacaatgactgtggggacaacagtgacgaagccggctgcagccactcctgttctagcacccagttcaagtgcaacagcgggcgttgcatccccgagcactggacctgcgatggggacaatgactgcggagactacagtgatgagacacacgccaactgcaccaaccaggccacgaggccccctggtggctgccacactgatgagttccagtgccggctggatggactatgcatccccctgcggtggcgctgcgatggggacactgactgcatggactccagcgatgagaagagctgtgagggagtgacccacgtctgcgatcccagtgtcaagtttggctgcaaggactcagctcggtgcatcagcaaagcgtgggtgtgtgatggcgacaatgactgtgaggataactcggacgaggagaactgcgagtccctggcctgcaggccaccctcgcacccttgtgccaacaacacctcagtctgcctgccccctgacaagctgtgtgatggcaacgacgactgtggcgacggctcagatgagggcgagctctgcgaccagtgctctctgaataacggtggctgcagccacaactgctcagtggcacctggcgaaggcattgtgtgttcctgccctctgggcatggagctggggcccgacaaccacacctgccagatccagagctactgtgccaagcatctcaaatgcagccaaaagtgcgaccagaacaagttcagcgtgaagtgctcctgctacgagggctgggtcctggaacctgacggcgagagctgccgcagcctggaccccttcaagccgttcatcattttctccaaccgccatgaaatccggcgcatcgatcttcacaaaggagactacagcgtcctggtgcccggcctgcgcaacaccatcgccctggacttccacctcagccagagcgccctctactggaccgacgtggtggaggacaagatctaccgcgggaagctgctggacaacggagccctgactagtttcgaggtggtgattcagtatggcctggccacacccgagggcctggctgtagactggattgcaggcaacatctactgggtggagagtaacctggatcagatcgaggtggccaagctggatgggaccctccggaccaccctgctggccggtgacattgagcacccaagggcaatcgcactggatccccgggatgggatcctgttttggacagactgggatgccagcctgccccgcattgaggcagcctccatgagtggggctgggcgccgcaccgtgcaccgggagaccggctctgggggctggcccaacgggctcaccgtggactacctggagaagcgcatcctttggattgacgccaggtcagatgccatttactcagcccgttacgacggctctggccacatggaggtgcttcggggacacgagttcctgtcgcacccgtttgcagtgacgctgtacgggggggaggtctactggactgactggcgaacaaacacactggctaaggccaacaagtggaccggccacaatgtcaccgtggtacagaggaccaacacccagccctttgacctgcaggtgtaccacccctcccgccagcccatggctcccaatccctgtgaggccaatgggggccagggcccctgctcccacctgtgtctcatcaactacaaccggaccgtgtcctgcgcctgcccccacctcatgaagctccacaaggacaacaccacctgctatgagtttaagaagttcctgctgtacgcacgtcagatggagatccgaggtgtggacctggatgctccctactacaactacatcatctccttcacggtgcccgacatcgacaacgtcacagtgctagactacgatgcccgcgagcagcgtgtgtactggtctgacgtgcggacacaggccatcaagcgggccttcatcaacggcacaggcgtggagacagtcgtctctgcagacttgccaaatgcccacgggctggctgtggactgggtctcccgaaacctgttctggacaagctatgacaccaataagaagcagatcaatgtggcccggctggatggctccttcaagaacgcagtggtgcagggcctggagcagccccatggccttgtcgtccaccctctgcgtgggaagctctactggaccgatggtgacaacatcagcatggccaacatggatggcagcaatcgcaccctgctcttcagtggccagaagggccccgtgggcctggctattgacttccctgaaagcaaactctactggatcagctccgggaaccataccatcaaccgctgcaacctggatgggagtgggctggaggtcatcgatgccatgcggagccagctgggcaaggccaccgccctggccatcatgggggacaagctgtggtgggctgatcaggtgtcggaaaagatgggcacatgcagcaaggctgacggctcgggctccgtggtccttcggaacagcaccaccctggtgatgcacatgaaggtctatgacgagagcatccagctggaccataagggcaccaacccctgcagtgtcaacaacggtgactgctcccagctctgcctgcccacgtcagagacgacccgctcctgcatgtgcacagccggctatagcctccggagtggccagcaggcctgcgagggcgtaggttcctttctcctgtactctgtgcatgagggaatcaggggaattcccctggatcccaatgacaagtcagatgccctggtcccagtgtccgggacctcgctggctgtcggcatcgacttccacgctgaaaatgacaccatctactgggtggacatgggcctgagcacgatcagccgggccaagcgggaccagacgtggcgtgaagacgtggtgaccaatggcattggccgtgtggagggcattgcagtggactggatcgcaggcaacatctactggacagaccagggctttgatgtcatcgaggtcgcccggctcaatggctccttccgctacgtggtgatctcccagggtctagacaagccccgggccatcaccgtccacccggagaaagggtacttgttctggactgagtggggtcagtatccgcgtattgagcggtctcggctagatggcacggagcgtgtggtgctggtcaacgtcagcatcagctggcccaacggcatctcagtggactaccaggatgggaagctgtactggtgcgatgcacggacagacaagattgaacggatcgacctggagacaggtgagaaccgcgaggtggttctgtccagcaacaacatggacatgttttcagtgtctgtgtttgaggatttcatctactggagtgacaggactcatgccaacggctctatcaagcgcgggagcaaagacaatgccacagactccgtgcccctgcgaaccggcatcggcgtccagcttaaagacatcaaagtcttcaaccgggaccggcagaaaggcaccaacgtgtgcgcggtggccaatggcgggtgccagcagctgtgcctgtaccggggccgtgggcagcgggcctgcgcctgtgcccacgggatgctggctgaagacggagcatcgtgccgcgagtatgccggctacctgctctactcagagcgcaccattctcaagagtatccacctgtcggatgagcgcaacctcaatgcgcccgtgcagcccttcgaggaccctgagcacatgaagaacgtcatcgccctggcctttgactaccgggcaggcacctctccgggcacccccaatcgcatcttcttcagcgacatccactttgggaacatccaacagatcaacgacgatggctccaggaggatcaccattgtggaaaacgtgggctccgtggaaggcctggcctatcaccgtggctgggacactctctattggacaagctacacgacatccaccatcacgcgccacacagtggaccagacccgcccaggggccttcgagcgtgagaccgtcatcactatgtctggagatgaccacccacgggccttcgttttggacgagtgccagaacctcatgttctggaccaactggaatgagcagcatcccagcatcatgcgggcggcgctctcgggagccaatgtcctgacccttatcgagaaggacatccgtacccccaatggcctggccatcgaccaccgtgccgagaagctctacttctctgacgccaccctggacaagatcgagcggtgcgagtatgacggctcccaccgctatgtgatcctaaagtcagagcctgtccaccccttcgggctggccgtgtatggggagcacattttctggactgactgggtgcggcgggcagtgcagcgggccaacaagcacgtgggcagcaacatgaagctgctgcgcgtggacatcccccagcagcccatgggcatcatcgccgtggccaacgacaccaacagctgtgaactctctccatgccgaatcaacaacggtggctgccaggacctgtgtctgctcactcaccagggccatgtcaactgctcatgccgagggggccgaatcctccaggatgacctcacctgccgagcggtgaattcctcttgccgagcacaagatgagtttgagtgtgccaatggcgagtgcatcaacttcagcctgacctgcgacggcgtcccccactgcaaggacaagtccgatgagaagccatcctactgcaactcccgccgctgcaagaagactttccggcagtgcagcaatgggcgctgtgtgtccaacatgctgtggtgcaacggggccgacgactgtggggatggctctgacgagatcccttgcaacaagacagcctgtggtgtgggcgagttccgctgccgggacgggacctgcatcgggaactccagccgctgcaaccagtttgtggattgtgaggacgcctcagatgagatgaactgcagtgccaccgactgcagcagctacttccgcctgggcgtgaagggcgtgctcttccagccctgcgagcggacctcactctgctacgcacccagctgggtgtgtgatggcgccaatgactgtggggactacagtgatgagcgcgactgcccaggtgtgaaacgccccagatgccctctgaattacttcgcctgccctagtgggcgctgcatccccatgagctggacgtgtgacaaagaggatgactgtgaacatggcgaggacgagacccactgcaacaagttctgctcagaggcccagtttgagtgccagaaccatcgctgcatctccaagcagtggctgtgtgacggcagcgatgactgtggggatggctcagacgaggctgctcactgtgaaggcaagacgtgcggcccctcctccttctcctgccctggcacccacgtgtgcgtccccgagcgctggctctgtgacggtgacaaagactgtgctgatggtgcagacgagagcatcgcagctggttgcttgtacaacagcacttgtgacgaccgtgagttcatgtgccagaaccgccagtgcatccccaagcacttcgtgtgtgaccacgaccgtgactgtgcagatggctctgatgagtcccccgagtgtgagtacccgacctgcggccccagtgagttccgctgtgccaatgggcgctgtctgagctcccgccagtgggagtgtgatggcgagaatgactgccacgaccagagtgacgaggctcccaagaacccacactgcaccagccaagagcacaagtgcaatgcctcgtcacagttcctgtgcagcagtgggcgctgtgtggctgaggcactgctctgcaacggccaggatgactgtggcgacagctcggacgagcgtggctgccacatcaatgagtgtctcagccgcaagctcagtggctgcagccaggactgtgaggacctcaagatcggcttcaagtgccgctgtcgccctggcttccggctgaaggacgacggccggacgtgtgctgatgtggacgagtgcagcaccaccttcccctgcagccagcgctgcatcaacactcatggcagctataagtgtctgtgtgtggagggctatgcaccccgcggcggcgacccccacagctgcaaggctgtgactgacgaggaaccgtttctgatcttcgccaaccggtactacctgcgcaagctcaacctggacgggtccaactacacgttacttaagcagggcctgaacaacgccgttgccttggattttgactaccgagagcagatgatctactggacagatgtgaccacccagggcagcatgatccgaaggatgcaccttaacgggagcaatgtgcaggtcctacaccgtacaggcctcagcaaccccgatgggctggctgtggactgggtgggtggcaacctgtactggtgcgacaaaggccgggacaccatcgaggtgtccaagctcaatggggcctatcggacggtgctggtcagctctggcctccgtgagcccagggctctggtggtggatgtgcagaatgggtacctgtactggacagactggggtgaccattcactgatcggccgcatcggcatggatgggtccagccgcagcgtcatcgtggacaccaagatcacatggcccaatggcctgacgctggactatgtcactgagcgcatctactgggccgacgcccgcgaggactacattgaatttgccagcctggatggctccaatcgccacgttgtgctgagccaggacatcccgcacatctttgcactgaccctgtttgaggactacgtctactggaccgactgggaaacaaagtccattaaccgagcccacaagaccacgggcaccaacaaaacgctcctcatcagcacgctgcaccggcccatggacctgcatgtcttccatgccctgcgccagccagacgtgcccaatcacccctgcaaggtcaacaatggtggctgcagcaacctgtgcctgctgtcccccgggggagggcacaaatgtgcctgccccaccaacttctacctgggcagcgatgggcgcacctgtgtgtccaactgcacggctagccagtttgtatgcaagaacgacaagtgcatccccttctggtggaagtgtgacaccgaggacgactgcggggaccactcagacgagcccccggactgccctgagttcaagtgccggcccggacagttccagtgctccacaggtatctgcacaaaccctgccttcatctgcgatggcgacaatgactgccaggacaacagtgacgaggccaactgtgacatccacgtctgcttgcccagtcagttcaaatgcaccaacaccaaccgctgtattcccggcatcttccgctgcaatgggcaggacaactgcggagatggggaggatgagagggactgccccgaggtgacctgcgcccccaaccagttccagtgctccattaccaaacggtgcatcccccgggtctgggtctgcgaccgggacaatgactgtgtggatggcagtgatgagcccgccaactgcacccagatgacctgtggtgtggacgagttccgctgcaaggattcgggccgctgcatcccagcgcgttggaagtgtgacggagaggatgactgtggggatggctcggatgagcccaaggaagagtgtgatgaacgcacctgtgagccataccagttccgctgcaagaacaaccgctgcgtgcccggccgctggcagtgcgactacgacaacgattgcggtgacaactccgatgaagagagctgcacccctcggccctgctccgagagtgagttctcctgtgccaacggccgctgcatcgcggggcgctggaaatgcgatggagaccacgactgcgcggacggctcggacgagaaagactgcaccccccgctgtgacatggaccagttccagtgcaagagcggccactgcatccccctgcgctggcgctgtgacgcagacgccgactgcatggacggcagcgacgaggaggcctgcggcactggcgtgcggacctgccccctggacgagttccagtgcaacaacaccttgtgcaagccgctggcctggaagtgcgatggcgaggatgactgtggggacaactcagatgagaaccccgaggagtgtgcccggttcgtgtgccctcccaaccggcccttccgttgcaagaatgaccgcgtctgtctgtggatcgggcgccaatgcgatggcacggacaactgtggggatgggactgatgaagaggactgtgagccccccacagcccacaccacccactgcaaagacaagaaggagtttctgtgccggaaccagcgctgcctctcctcctccctgcgctgcaacatgttcgatgactgcggggacggctctgacgaggaggactgcagcatcgaccccaagctgaccagctgcgccaccaatgccagcatctgtggggacgaggcacgctgcgtgcgcaccgagaaagcggcctactgtgcctgccgctcgggcttccacaccgtgcccggccagcccggatgccaagacatcaacgagtgcctgcgcttcggcacctgctcccagctctgcaacaacaccaagggcggccacctctgcagctgcgctcggaacttcatgaagacgcacaacacctgcaaggccgaaggctctgagtaccaggtcctgtacatcgctgatgacaatgagatccgcagcctgttccccggccacccccattcggcttacgagcaggcattccagggtgacgagagtgtccgcattgatgctatggatgtccatgtcaaggctggccgtgtctattggaccaactggcacacgggcaccatctcctaccgcagcctgccacctgctgcgcctcctaccacttccaaccgccaccggcgacagattgaccggggtgtcacccacctcaacatttcagggctgaagatgcccagaggcatcgccatcgactgggtggccggaaacgtgtactggaccgactcgggccgagatgtgattgaggtggcgcagatgaagggcgagaaccgcaagacgctcatctcgggcatgattgacgagccccacgccattgtggtggacccactgagggggaccatgtactggtcagactggggcaaccaccccaagattgagacggcagcgatggatgggacgcttcgggagacactggtgcaggacaacattcagtggcccacaggcctggccgtggattatcacaatgagcggctgtactgggcagacgccaagctttcagtcatcggcagcatccggctcaatggcacggaccccattgtggctgctgacagcaaacgaggcctaagtcaccccttcagcatcgacgtctttgaggattacatctatggtgtcacctacatcaataatcgtgtcttcaagatccataagtttggccacagccccttggtcaacctgacagggggcctgagccacgcctctgacgtggtcctttaccatcagcacaagcagcccgaagtgaccaacccatgtgaccgcaagaaatgcgagtggctctgcctgctgagccccagtgggcctgtctgcacctgtcccaatgggaagcggctggacaacggcacatgcgtgcctgtgccctctccaacgccccccccagatgctccccggcctggaacctgtaacctgcagtgcttcaacggtggcagctgtttcctcaatgcacggaggcagcccaagtgccgctgccaaccccgctacacgggtgacaagtgtgaactggaccagtgctgggagcactgtcgcaatgggggcacctgtgctgcctccccctctggcatgcccacgtgccggtgccccacgggcttcacgggccccaaatgcacccagcaggtgtgtgcgggctactgtgccaacaacagcacctgcactgtcaaccagggcaaccagccccagtgccgatgcctacccggcttcctgggcgaccgctgccagtaccggcagtgctctggctactgtgagaactttggcacatgccagatggctgctgatggctcccgacaatgccgctgcactgcctactttgagggatcgaggtgtgaggtgaacaagtgcagccgctgtctcgaaggggcctgtgtggtcaacaagcagagtggggatgtcacctgcaactgcacggatggccgggtggcccccagctgtctgacctgcgtcggccactgcagcaatggcggctcctgtaccatgaacagcaaaatgatgcctgagtgccagtgcccaccccacatgacagggccccggtgtgaggagcacgtcttcagccagcagcagccaggacatatagcctccatcctaatccctctgctgttgctgctgctgctggttctggtggccggagtggtattctggtataagcggcgagtccaaggggctaagggcttccagcaccaacggatgaccaacggggccatgaacgtggagattggaaaccccacctacaagatgtacgaaggcggagagcctgatgatgtgggaggcctactggacgctgactttgccctggaccctgacaagcccaccaacttcaccaaccccgtgtatgccacactctacatggggggccatggcagtcgccactccctggccagcacggacgagaagcgagaactcctgggccggggccctgaggacgagataggggaccccttggcatagggccctgccccgtcggactgcccccagaaagcctcctgccccctgccggtgaagtccttcagtgagcccctccccagccagcccttccctggccccgccggatgtataaatgtaaaaatgaaggaattacattttatatgtgagcgagcaagccggcaagcgagcacagtattatttctccatcccctccctgcctgctccttggcacccccatgctgccttcagggagacaggcagggagggcttggggctgcacctcctaccctcccaccagaacgcaccccactgggagagctggtggtgcagccttcccctccctgtataagacactttgccaaggctctcccctctcgccccatccctgcttgcccgctcccacagcttcctgagggctaattctgggaagggagagttctttgctgcccctgtctggaagacgtggctctgggtgaggtaggcgggaaaggatggagtgttttagttcttgggggaggccaccccaaaccccagccccaactccaggggcacctatgagatggccatgctcaacccccctcccagacaggccctccctgtctccagggcccccaccgaggttcccagggctggagacttcctctggtaaacattcctccagcctcccctcccctggggacgccaaggaggtgggccacacccaggaagggaaagcgggcagccccgttttggggacgtgaacgttttaataatttttgctgaattcctttacaactaaataacacagatattgttataaataaaattgtaaaaaaaaaaaaaaaaaaa

SEQ ID NO: 63 - DNA, 3572 bp, HOMO SAPIENS
acctgcacttctgggggcgtcgagcctggcggtagaatcttcccagtaggcggcgcgggagggaaaagaggattgaggggctaggccgggcggatcccgtcctcccccgatgtgagcagttttccgaaaccccgtcaggcgaaggctgcccagagaggtggagtcggtagcggggccgggaacatgaggcagtctctcctattcctgaccagcgtggttcctttcgtgctggcgccgcgacctccggatgacccgggcttcggcccccaccagagactcgagaagcttgattctttgctctcagactacgatattctctctttatctaatatccagcagcattcggtaagaaaaagagatctacagacttcaacacatgtagaaacactactaactttttcagctttgaaaaggcattttaaattatacctgacatcaagtactgaacgtttttcacaaaatttcaaggtcgtggtggtggatggtaaaaacgaaagcgagtacactgtaaaatggcaggacttcttcactggacacgtggttggtgagcctgactctagggttctagcccacataagagatgatgatgttataatcagaatcaacacagatggggccgaatataacatagagccactttggagatttgttaatgataccaaagacaaaagaatgttagtttataaatctgaagatatcaagaatgtttcacgtttgcagtctccaaaagtgtgtggttatttaaaagtggataatgaagagttgctcccaaaagggttagtagacagagaaccacctgaagagcttgttcatcgagtgaaaagaagagctgacccagatcccatgaagaacacgtgtaaattattggtggtagcagatcatcgcttctacagatacatgggcagaggggaagagagtacaactacaaattacttaatagagctaattgacagagttgatgacatctatcggaacacttcatgggataatgcaggttttaaaggctatggaatacagatagagcagattcgcattctcaagtctccacaagaggtaaaacctggtgaaaagcactacaacatggcaaaaagttacccaaatgaagaaaaggatgcttgggatgtgaagatgttgctagagcaatttagctttgatatagctgaggaagcatctaaagtttgcttggcacaccttttcacataccaagattttgatatgggaactcttggattagcttatgttggctctcccagagcaaacagccatggaggtgtttgtccaaaggcttattatagcccagttgggaagaaaaatatctatttgaatagtggtttgacgagcacaaagaattatggtaaaaccatccttacaaaggaagctgacctggttacaactcatgaattgggacataattttggagcagaacatgatccggatggtctagcagaatgtgccccgaatgaggaccagggagggaaatatgtcatgtatcccatagctgtgagtggcgatcacgagaacaataagatgttttcaaactgcagtaaacaatcaatctataagaccattgaaagtaaggcccaggagtgttttcaagaacgcagcaataaagtttgtgggaactcgagggtggatgaaggagaagagtgtgatcctggcatcatgtatctgaacaacgacacctgctgcaacagcgactgcacgttgaaggaaggtgtccagtgcagtgacaggaacagtccttgctgtaaaaactgtcagtttgagactgcccagaagaagtgccaggaggcgattaatgctacttgcaaaggcgtgtcctactgcacaggtaatagcagtgagtgcccgcctccaggaaatgctgaagatgacactgtttgcttggatcttggcaagtgtaaggatgggaaatgcatccctttctgcgagagggaacagcagctggagtcctgtgcatgtaatgaaactgacaactcctgcaaggtgtgctgcagggacctttctggccgctgtgtgccctatgtcgatgctgaacaaaagaacttatttttgaggaaaggaaagccctgtacagtaggattttgtgacatgaatggcaaatgtgagaaacgagtacaggatgtaattgaacgattttgggatttcattgaccagctgagcatcaatacttttggaaagtttttagcagacaacatcgttgggtctgtcctggttttctccttgatattttggattcctttcagcattcttgtccattgtgtggataagaaattggataaacagtatgaatctctgtctctgtttcaccccagtaacgtcgaaatgctgagcagcatggattctgcatcggttcgcattatcaaaccctttcctgcgccccagactccaggccgcctgcagcctgcccctgtgatcccttcggcgccagcagctccaaaactggaccaccagagaatggacaccatccaggaagaccccagcacagactcacatatggacgaggatgggtttgagaaggaccccttcccaaatagcagcacagctgccaagtcatttgaggatctcacggaccatccggtcaccagaagtgaaaaggctgcctcctttaaactgcagcgtcagaatcgtgttgacagcaaagaaacagagtgctaatttagttctcagctcttctgacttaagtgtgcaaaatatttttatagatttgacctacaaatcaatcacagcttgtattttgtgaagactgggaagtgacttagcagatgctggtcatgtgtttgaacttcctgcaggtaaacagttcttgtgtggtttggcccttctccttttgaaaaggtaaggtgaaggtgaatctagcttattttgaggctttcaggttttagtttttaaaatatcttttgacctgtggtgcaaaagcagaaaatacagctggattgggttatgaatatttacgtttttgtaaattaatcttttatattgataacagcactgactagggaaatgatcagtttttttttatacactgtaatgaaccgctgaatatgaggcatttggcatttatttgtgatgacaactggaatagttttttttttttttttttttttttgccttcaactaaaaacaaaggagataaatctagtatacattgtctctaaattgtgggtctatttctagttattacccagagtttttatgtagcagggaaaatatatatctaaatttagaaatcatttgggttaatatggctcttcataattctaagactaatgctctctagaaacctaaccacctaccttacagtgagggctatacatggtagccagttgaatttatggaatctaccaactgtttagggccctgatttgctgggcagtttttctgtattttataagtatcttcatgtatccctgttactgatagggatacatgctcttagaaaattcactattggctgggagtggtggctcatgcctgtaatcccagcacttggagaggctgaggttgcgccactacactccagcctgggtgacagagtgagactctgcctcaaaaaaaaaaaaaaaaaaaaa

SEQ ID NO: 64 - DNA, 2669 bp, HOMO SAPIENS
aaaagagtctcgccggcgtccccgcccgcacactcgcgcacactcgcgctcgggcgcacacggagcagggaccggcgcccggagcgagccagggagcggctaaccggggacccaccgcgcggagccagcctagctgccagcgagcccaacccgcgacgacccacgcccctgagccccgcagccgacccctgccggccggtgtccccaccgccatccctgacccatggcgctgaagaggattcagaaagaattgagtgatctacagcgcgatccacctgctcactgttcagctggacctgtgggagatgacttgttccactggcaagccactattatggggcctcctgatagcgcatatcaaggtggagtcttctttctcactgtacattttccgacagattatccttttaaaccaccaaagattgctttcacaacaaaaatttaccatccaaacataaacagtaatggaagtatttgtctcgatattctgaggtcacaatggtcaccagctctgactgtatcaaaagttttattgtccatatgttctctactttgtgatcctaatccagatgaccccttagtaccagatattgcacaaatctataaatcagacaaagaaaaatacaacagacatgcaagagaatggactcagaaatatgcaatgtaaaaatcaaaaacattttcatatataccagagtactgtaaaatctaggtttttttcaacattagcagtaaattgagcactgtttactgtttcattgtaccatgaaaccatttgatttttacccattttaaatgtgtttctgaagcaagacaaaacaaacttccaaaaatacccttaagactgtgatgagagcatttatcattttgtatgcattgagaaagacatttattatggtttttaagatacttggacatctgcatcttcagcttacaagatctacaatgcagctgaaaagcaaccaaattattttttgctgaaactagatgtttttacatgagaaatactgtatgtgttgtctaagatgtcagttttataaatctgtattcagatttcattctttgttagctcactttataatttgtatttttttactgtatagactaaatatattctatttacatgtatgtcaactcattacttttttcctgtgaacagtattgaaaaaccccaacggctgataattaagtgaattaactgtgtctcccttgtcttaggatattctgtagattgattgcagatttcttaaatctgaaatgatctttacactgtaattctcagcatactgattatggagaaacacttgttttgattttgttatacttgacttaactttattgcaatgtgaattaattgcactgctaagtaggaagatgtgtaacttttatttgttgctattcacatttgaattttttcctgtataggcaatattatattgacaccttttacagatcttactgtagctttttccatataaataaaatgctttttctactatttgtcttgattacttaaaaaaataaaaatataagtaaggatcaaaactctaaaattttgcatgaaaattacatccaaattgtgaaaatcagatctattttgtttgccattagtcaccattagttatataaattttattgttttaggttagtatctctttactaaattgtcagtctataagataatatatgttgatcccttgctgtagaggagaatttagagtaatttggggtttgtcttggattatatctaaatggattatttgttaaaagtactgaaatgagtataaggcagtatcacccatccaaaagaaaggtctttatagacctgcacagtcactagattaattcattaaaatgcccccaccctgatgtaattgacattacatttcttaacattttaaaatctagaatttctaaaatggaatttaatgccatcacaatttgaaaaactttttttttttttttactatagaagttacaaaggaagttctaaaattatgcctccctctgtttttataagttgccatcgaaaagtgatttaaataagcaggttatctttatagattttaaagaaaactagaaagttttaatgttttaacttggggaaaaatacatctctttaatgtttagcatgcttgtcaaccttgagtgagtgtcatttttaagaacagttgtagcccttctgattattgcagtagctgtagaagtatgtaagaatatgtgatgggtgtagtcattagcaaagcatttaaatcacttgagtattttgtcatggttcattattattaaagcacaaaataacctattgttagaaaatatgtgtttttataaatgaatgtaaaataattaaatgaattgtgaaatggatgtttaagaaaatataggcttaaaaagtaaatctataaaatgatgtcttaaaacagccatatcatgaaaaattctacttagctatattattataagctacatttgccctgaatttgaacactcaacatcactagatttaaatatttagtatattttgatagtaaagggttttgtttcttgaatatcttcactttaaacaaaaaaaaaaaacaactttcatttgtgtggcatttatttttggaagtgtcttcttttttttctttattaaagtttttgaaacttgcaaaaaaaaaaaaaaaaaa

SEQ ID NO: 65 - DNA, 5619 bp, HOMO SAPIENS; identical to SEQ ID NO: 2

SEQ ID NO: 66 - DNA, 3927 bp, HOMO SAPIENS
gcggcggcaggcctagcagcacgggaaccgtcccccgcgcgcatgcgcgcgcccctgaagcgcctgggggacgggtatgggcgggaggtaggggcgcggctccgcgtgccagttgggtgcccgcgcgtcacgtggtgaggaaggaggcggaggtctgagtttcgaaggagggggggagagaagagggaacgagcaagggaaggaaagcggggaaaggaggaaggaaacgaacgagggggagggaggtccctgttttggaggagctaggagcgttgccggcccctgaagtggagcgagagggaggtgcttcgccgtttctcctgccaggggaggtcccggcttcccgtggaggctccggaccaagccccttcagcttctccctccggatcgatgtgctgctgttaacccgtgaggaggcggcggcggcggcagcggcagcggaagatggtgttgctgagagtgttaattctgctcctctcctgggcggcggggatgggaggtcagtatgggaatcctttaaataaatatatcagacattatgaaggattatcttacaatgtggattcattacaccaaaaacaccagcgtgccaaaagagcagtctcacatgaagaccaatttttacgtctagatttccatgcccatggaagacatttcaacctacgaatgaagagggacacttcccttttcagtgatgaatttaaagtagaaacatcaaataaagtacttgattatgatacctctcatatttacactggacatatttatggtgaagaaggaagttttagccatgggtctgttattgatggaagatttgaaggattcatccagactcgtggtggcacattttatgttgagccagcagagagatatattaaagaccgaactctgccatttcactctgtcatttatcatgaagatgatattaactatccccataaatacggtcctcaggggggctgtgcagatcattcagtatttgaaagaatgaggaaataccagatgactggtgtagaggaagtaacacagatacctcaagaagaacatgctgctaatggtccagaacttctgaggaaaaaacgtacaacttcagctgaaaaaaatacttgtcagctttatattcagactgatcatttgttctttaaatattacggaacacgagaagctgtgattgcccagatatccagtcatgttaaagcgattgatacaatttaccagaccacagacttctccggaatccgtaacatcagtttcatggtgaaacgcataagaatcaatacaactgctgatgagaaggaccctacaaatcctttccgtttcccaaatattggtgtggagaagtttctggaattgaattctgagcagaatcatgatgactactgtttggcctatgtcttcacagaccgagattttgatgatggcgtacttggtctggcttgggttggagcaccttcaggaagctctggaggaatatgtgaaaaaagtaaactctattcagatggtaagaagaagtccttaaacactggaattattactgttcagaactatgggtctcatgtacctcccaaagtctctcacattacttttgctcacgaagttggacataactttggatccccacatgattctggaacagagtgcacaccaggagaatctaagaatttgggtcaaaaagaaaatggcaattacatcatgtatgcaagagcaacatctggggacaaacttaacaacaataaattctcactctgtagtattagaaatataagccaagttcttgagaagaagagaaacaactgttttgttgaatctggccaacctatttgtggaaatggaatggtagaacaaggtgaagaatgtgattgtggctatagtgaccagtgtaaagatgaatgctgcttcgatgcaaatcaaccagagggaagaaaatgcaaactgaaacctgggaaacagtgcagtccaagtcaaggtccttgttgtacagcacagtgtgcattcaagtcaaagtctgagaagtgtcgggatgattcagactgtgcaagggaaggaatatgtaatggcttcacagctctctgcccagcatctgaccctaaaccaaacttcacagactgtaataggcatacacaagtgtgcattaatgggcaatgtgcaggttctatctgtgagaaatatggcttagaggagtgtacgtgtgccagttctgatggcaaagatgataaagaattatgccatgtatgctgtatgaagaaaatggacccatcaacttgtgccagtacagggtctgtgcagtggagtaggcacttcagtggtcgaaccatcaccctgcaacctggatccccttgcaacgattttagaggttactgtgatgttttcatgcggtgcagattagtagatgctgatggtcctctagctaggcttaaaaaagcaatttttagtccagagctctatgaaaacattgctgaatggattgtggctcattggtgggcagtattacttatgggaattgctctgatcatgctaatggctggatttattaagatatgcagtgttcatactccaagtagtaatccaaagttgcctcctcctaaaccacttccaggcactttaaagaggaggagacctccacagcccattcagcaaccccagcgtcagcggccccgagagagttatcaaatgggacacatgagacgctaactgcagcttttgccttggttcttcctagtgcctacaatgggaaaacttcactccaaagagaaacctattaagtcatcatctccaaactaaaccctcacaagtaacagttgaagaaaaaatggcaagagatcatatcctcagaccaggtggaattacttaaattttaaagcctgaaaattccaatttgggggtgggaggtggaaaaggaacccaattttcttatgaacagatatttttaacttaatggcacaaagtcttagaatattattatgtgccccgtgttccctgttcttcgttgctgcattttcttcacttgcaggcaaacttggctctcaataaacttttaccacaaattgaaataaatatatttttttcaactgccaatcaaggctaggaggctcgaccacctcaacattggagacatcacttgccaatgtacataccttgttatatgcagacatgtatttcttacgtacactgtacttctgtgtgcaattgtaaacagaaattgcaatatggatgtttctttgtattataaaatttttccgctcttaattaaaaattactgtttaattgacatactcaggataacagagaatggtggtattcagtggtccaggattctgtaatgctttacacaggcagttttgaaatgaaaatcaatttacctttctgttacgatggagttggttttgatactcattttttctttatcacatggctgctacgggcacaagtgactatactgaagaacacagttaagtgttgtgcaaactggacatagcagcacatactacttcagagttcatgatgtagatgtctggtttctgcttacgtcttttaaactttctaattcaattccatttttcaattaataggtgaaattttattcatgctttgatagaaattatgtcaatgaaatgattctttttatttgtagcctacttatttgtgtttttcatatatctgaaatatgctaattatgttttctgtctgatatggaaaagaaaagctgtgtctttatcaaaatatttaaacggttttttcagcatatcatcactgatcattggtaaccactaaagatgagtaatttgcttaagtagtagttaaaattgtagataggccttctgacattttttttcctaaaatttttaacagcattgaaggtgaaacagcacaatgtcccattccaaatttatttttgaaacagatgtaaataattggcattttaaagag

SEQ ID NO: 67 - DNA, 1394 bp, HOMO SAPIENS
ccgagggcggggccgggcccgggagcctgtggcttcaggaagaggagggcaaggtgtctggctgcgcgtttggctgcaatgagctcggcctcggggctccgcagggggcacccggcagtgtcaactgttagccacgcagatgccgattgctttgtgtgtgtcttcctgagccatggcgaaggcaatcacatttatgcatatgatgctaaaatcgaaattcagacattaactggcttgttcaaaggagacaagtgtcacagcctggttggaaaacccaagatatttatcattcaggcatgtcggggaaaccagcacgatgtgccagtcattcctttggatgtagtagataatcagacagagaagttggacaccaacataactgaggtggatgcagcctccgtttacacgctgcctgctggagctgacttcctcatgtgttactctgttgcagaaggatattattctcaccgggaaactgtgaacggctcatggtacattcaagatttgtgtgagatgttgggaaaatatggctcctccttagagttcacagaactcctcacactggtgaacaggaaagtttctcagcgccgagtggacttttgcaaagacccaagtgcaattggaaagaagcaggttccctgttttgcctcaatgctaactaaaaagctgcatttctttccaaaatctaattaattaatagaggctatctaattttacactctgtattgaaaatggctttctcagccaggcgtggttactcacacctgtaatcccagcactttgggagtccaaggtgggcggatcacctgaggtcgggagttcgagaccagcctgaccaacatggagaagccccgtctctactaaaaatgcaaaaaaaaatttagctaggcatggcggcgcatgcctgcaatcccagctacttggaaggctgaggcaggagaatcacttgaacccaggaggtggaggctgcggtgagccgagattgcgccattgcactccagcctgggcaacgagtgaaactccgtctcaaaaaaaagaaaatgtctttctcttccttttatataaatatcgttagggtgaagcattatggtctaatgattcaaatgttttaaagtttaatgcctagcagagaactgccttaaaaaaaaaaaaaaaaagttcatgttggccatggtgaaagggtttgatatggagaaacaaaatcctcaggaaattagataaataaaaatttataagcatttgtattattttttaataaactgcagggttacacaaaaatctagctgatttaacttgtattttgtcacttttttataaaagtttattgtttgatgtttttaaaggtttttgaaatccaggaattaaatcatcccttaataaaatattcgaaattc

SEQ ID NO: 68 - DNA, 2322 bp, HOMO SAPIENS
atctcgagatagccgcagctctcgcgatctttctggagccgcacctccacgcggagtccgagcgcgtgtgctgagaccccagggtcgggagggcggagactgggagggagggagaagcccctttggcctgccttacggaagcctgcgagggagggtggtgtccactgcccagttccgtgtcccgatgcccagcgccagcgccagccgcaagagtcaggagaagccgcgggagatcatggacgcggcggaagattatgctaaagagagatatggaatatcttcaatgatacaatcacaagaaaaaccagatcgagttttggttcgggttagagacttgacaatacaaaaagctgatgaagttgtttgggtacgtgcaagagttcatacaagcagagctaaagggaaacagtgcttcttagtcctacgtcagcagcagtttaatgtccaggctcttgtggcggtgggagaccatgcaagcaagcagatggttaaatttgctgccaacatcaacaaagagagcattgtggatgtagaaggtgttgtgagaaaagtgaatcagaaaattggaagctgtacacagcaagacgttgagttacatgttcagaagatttatgtgatcagtttggctgaaccccgtctgcccctgcagctggatgatgctgttcggcctgaggcagaaggagaagaggaaggaagagctactgttaaccaggatacaagattagacaacagagtcattgatcttaggacatcaactagtcaggcagtcttccgtctccagtctggcatctgccatctcttccgagaaactttaattaacaaaggttttgtggaaatccaaactcctaaaattatttcagctgccagtgaaggaggagccaatgtttttactgtgtcatattttaaaaataatgcatacctggctcagtccccacagctatataagcaaatgtgcatttgtgctgattttgagaaggttttctctattggaccagtattcagagcggaagactctaatacccatagacatctaactgagtttgttggtttggacattgaaatggcttttaattaccattaccacgaagttatggaagaaattgctgacaccatggtacaaatattcaaaggacttcaagaaaggtttcagactgaaattcaaacagtgaataaacagttcccatgtgagccattcaaatttttggagccaactctaagactagaatattgtgaagcattggctatgcttagggaagctggagtcgaaatgggagatgaagacgatctgagcacaccaaatgaaaagctgttgggtcatttggtaaaggaaaagtatgatacagatttttatattcttgataaatatccattggctgtaagacctttctataccatgcctgacccaagaaatcccaaacagtccaactcttacgatatgttcatgagaggagaagaaatattgtcaggagctcaaagaatacatgatcctcaactgctaacagagagagctttacatcatggaattgatttggagaaaattaaggcttacattgattccttccgctttggagcccctcctcatgctggtggaggcattggattggaacgagttactatgctgtttctgggattgcataatgttcgtcagacctccatgttccctcgtgatcccaaacgactcactccttaaattcacactttgccacttaactccagtgtggatgacagagcgagaccctgcctcaaaaaaaaaaaaaaaaaaagaaagccacacttattcttttcagtaacctgctagtgcacaggctgtactttaggtacttaaaatatgcactagaataaatttgcaaggccctaaaatatcactgttatttttggagtaattcagtataggttcgtttaaaagagatttttataacttcagacatgcatcagtaggaaataacttgagaaattcatatggttatgttacaaattcatattctgttactacagtaaacgttaagagttttaaacagttaagattgtacaatttttcttcttttctatattacaagggccccagtgttaatgtcttagattttcagtatttgaacttatttttttaaattctgtcattgagataagaataattcaggtagcatctgaaattttaatgaatgtataattggcatatcatggaaaattaaccagaaagtatcagttcttaaaagttatgcctagaaattatgtaaagctaaactactggttagaaagtattcagtgtaatattgtattaatttgttaaattctaaacttgaatttcaataaaattttaaagct

SEQ ID NO: 69 - DNA, 2474 bp, HOMO SAPIENS
gacagatcagttccggcaagcctcgaggctcacggggtttatgcacactaacttcactgagccagggagcacggaagttgtgccactgtgcaacttgggttttctttatcctgcagtctttacctcagcagaaccgcacaccacagactccctccagctctttgtgtgtggctctctcagggtccaacaagagcaagctgtgggtctgtgagtgtttatgtgtgcttttattcacttcacacttattgaaaagtgtgtatgtgagagggtggggtgtgtgtgtcaaagagagtgaggaagagaaggagagagagatcaattgattctgcagcctcagctccagcatccctcagttgggagcttccaaagccgggtgatcacttggggtgcatagctcggagatgcagtccccctggaaaatccttacggtggcgcctctattcttgctcctgtctcttcagtcctcggcctctccagccaacgatgaccagtccaggcccagcctctcgaatgggcacacctgtgtagggtgtgtgctggtggtgtctgtaatagaacagcttgctcaagttcacaactcgacggtccaggcctcgatggagagactgtgcagctacctgcctgaaaaactgttcttgaaaaccacctgctatttagtcattgacaagtttggatcagacatcataaaactgcttagcgcagatatgaatgctgatgtggtatgtcacactctggagttttgtaaacagaacactggccaaccattgtgtcatctctaccctcttcccaaggagacatggaaatttacactacagaaggcaagacaaattgtcaagaagtccccgattctgaaatattctagaagtggttctgacatttgttcactcccggttttggccaagatctgccagaaaattaaattagctatggaacagtctgtgccattcaaagatgtggattcagacaaatacagcgttttcccaacactgcggggctatcactggcgggggagagactgtaatgacagcgacgagtcagtgtacccaggtagaaggccgaacaactgggatgtccatcaggattcaaactgtaatggcatttggggtgtcgatccaaaagatggagttccatatgagaagaaattctgtgaaggttcacagcccaggggaatcattttgctgggagactcagctggggctcattttcacatctctcctgaatggatcacagcgtcgcagatgtctttgaactctttcatcaatctaccaacagcccttaccaacgagcttgactggccccaactctctggtgctacaggatttctggactccactgttggaattaaagaaaaatctatttaccttcgcttatggaaaagaaaccactgtaatcacagggactaccagaatatttcaagaaatggtgcatcttcccgaaacctgaagaaatttatagaaagcttgtctagaaacaaggtgttggactatcccgccatcgttatatatgccatgattggaaatgatgtctgcagtgggaagagtgacccagtcccagccatgaccactcctgagaaactctactccaacgtcatgcagactctgaagcatctaaattcccacctgcccaatggcagccatgttattttgtatggcttaccagatggaacctttctctgggataatttgcacaacagatatcatcctctcggccagctaaataaagacatgacctatgcgcagttgtactccttcctgaactgcctccaggtcagcccctgccacggctggatgtcttccaacaagacgttgcggactctcacttcagagagagcagagcaactctccaacacactgaaaaaaattgcagccagtgagaaatttacaaacttcaatcttttctacatggattttgccttccatgaaatcatacaggagtggcagaagagaggcggacagccctggcagctcatcgagcccgtggatggattccaccccaacgaggtggctttgctgttgttggcggatcatttctggaaaaaggtgcagctccagtggccccaaatcctgggaaaggagaatccgttcaacccccagattaaacaggtgtttggagaccaaggcgggcactgagcctctcaggagcatgcacccctggggagcacagggaggcagaggcttgggtaaactcattccacaaaccctatgggggctgccacgtcacaggcccaaaggactcttcttcagcagcatctttgcaaaatgtctttctctcaatgaagagcatatctggacgactgtgcaatgctgtgtgctcccgggatcagtaacccttccgctgttcctgaaataacctttcataaagtgctttgggtgccattccaaaaaaaaaaaaaaaaaaaaaaaaaaaaaaaaaaaaaaaaaaaaaaaaaaaaaaaaaaaaaaaaaaaaaaaaaaaaaaaaaaaaaaaaaaaaaaa

SEQ ID NO: 70 - DNA, 3492 bp, HOMO SAPIENS
caggccgcaggatggcctggtcccgggccgggagcccagcaggccgggagcggctgaggccacaccccgcgggccgggccgcttccctccggtgaatcatcgctcgcagcggcggcgcccgcagtggccgcagcagcgcgccgggccctggccgcgccccagccgagcgcagcgcggagtcgccccgacctttctctgcgcagtacggccgccgggaccgcagcatggcgggcatcgcggccaagctggcgaaggaccgggaggcggccgaggggctgggctcccacgagagggccatcaagtacctcaaccaggactacgaggcgctgcggaacgagtgcctggaggccgggacgctcttccaggacccgtccttcccggccatcccctcggccctgggcttcaaggagttggggccctactccagcaaaacccggggcatcgagtggaagcgccccacggagatctgcgctgacccccagtttatcattggaggagccacccgcacagacatctgccaaggagccctgggtgactgctggctgctggcagccattgcctccctcaccttgaatgaagaaatcctggctcgagtcgtccccctaaaccagagcttccaggaaaactatgcagggatctttcacttccagttctggcaatacggcgagtgggtggaggtggtggtggatgacaggctgcccaccaaggacggggagctgctctttgtgcattcagccgaagggagcgagttctggagcgccctgctggagaaggcatacgccaagatcaacggatgctatgaagcgctatcagggggtgccaccactgagggcttcgaagacttcaccggaggcattgctgagtggtatgagttgaagaagccccctcccaacctgttcaagatcatccagaaagctctgcaaaaaggctctctccttggctgctccatcgacatcaccagcgccgcggactcggaggccatcacgtttcagaagctggtgaaggggcacgcgtactcggtcaccggagccgaggaggttgaaagtaacggaagcctacagaaactgatccgcatccgaaatccctggggagaagtggagtggacagggcggtggaatgacaactgcccaagctggaacactatagacccagaggagagggaaaggctgaccagacggcatgaagatggagaattctggatgtctttcagtgacttcctgaggcactattcccgcctggagatctgtaacctgaccccagacactctcaccagcgatacctacaagaagtggaaactcaccaaaatggatgggaactggaggcggggctccaccgcgggaggttgcaggaactacccgaacacattctggatgaaccctcagtacctgatcaagctggaggaggaggatgaggacgaggaggatggggagagcggctgcaccttcctggtggggctcattcagaagcaccgacggcggcagaggaagatgggcgaggacatgcacaccatcggctttggcatctatgaggttccagaggagttaagtgggcagaccaacatccacctcagcaaaaacttcttcctgacgaatcgcgccagggagcgctcagacaccttcatcaacctccgggaggtgctcaaccgcttcaagctgccgccaggagagtacattctcgtgccttccaccttcgaacccaacaaggatggggatttctgcatccgggtcttttctgaaaagaaagctgactaccaagctgtcgatgatgaaatcgaggccaatcttgaagagttcgacatcagcgaggatgacattgatgatggattcaggagactgtttgcccagttggcaggagaggatgcggagatctctgcctttgagctgcagaccatcctgagaagggttctagcaaagcgccaagatatcaagtcagatggcttcagcatcgagacatgcaaaattatggttgacatgctagattcggacgggagtggcaagctggggctgaaggagttctacattctctggacgaagattcaaaaataccaaaaaatttaccgagaaatcgacgttgacaggtctggtaccatgaattcctatgaaatgcggaaggcattagaagaagcaggtttcaagatgccctgtcaactccaccaagtcatcgttgctcggtttgcagatgaccagctcatcatcgattttgataattttgttcggtgtttggttcggctggaaacgctattcaagatatttaagcagctggatcccgagaatactggaacaatagagctcgaccttatctcttggctctgtttctcagtactttgaagttataactaatctgcctgaagacttctcatgatggaaaatcagccaaggactaagcttccatagaaatacactttgtatctggacctcaaaattatgggaacatttacttaaacggatgatcatagctgaaaataatgatactgtcaatttgagatagcagaagtttcacacatcaaagtaaaagatttgcatatcattatactaaatgcaaatgagtcgcttaacccttgacaaggtcaaagaaagctttaaatctgtaaatagtatacactttttacttttacacactttcctgttcatagcaatattaaatcaggaaaaaaaaatgcagggaggtatttaacagctgagcaaaaacattgagtcgctctcaaaggacacgaggcccttggcagggaatatttaaagcaacttcaagtttaaaatgcagctgttgattctaccaaacaacagtccaagattaccatttcccatgagccaactgggaaacatggtatatcatgaagtaatcttgtcaaggcatctggagagtccaggagagaagactcacctctgtcgcttgggttaaacaagagacaggttttgtagaatattgattggtaatagtaaatcgttctccttacaatcaagttcttgaccctattcggccttatacatctggtcttacaaagaccaaagggatcctgcgcttgatcaactgaaccagtatgccaaaaccaggcatccaatttgtaaaccaattatgataaaggacaaaataagctgtttgccacctcaaaactttatgaacttcaccaccactagtgtctgtccatggagttagaggggacatcacttagaagttcttatagaaaggacacaagtttgtttcctggctttaccttgggaaaatgctagcaacattatagaaattttgccttgttgccttatcttcttccaaatgtactgttaaataaaaataaagggttaccccatgcaatcacaccatgccatgttttccttcctggagggcagccccacaggacggtttatgagcacacaattatagcttgtttctactttaacaaggtatgctgcctctgtaaattcatgtattcaaaggaaaagacaccttgcctataattaaaatgtggaactataaaattttttaaaatccaaaaaa

SEQ ID NO: 71 - DNA, 3945 bp, HOMO SAPIENS
ggggcggggccgggagggtacttagggccggggctggcccaggctacggcggctgcagggctccggcaaccgctccggcaacgccaaccgctccgctgcgcgcaggctgggctgcaggctctcggctgcagcgctgggctggtgtgcagtggtgcgaccacggctcacggcagcctcagccacccagatgtaagcgatctggttcccacctcagcctcccgagtagtgtcttcaggcctatggagagcagcttgcgtgggctgggcctgcagtacctggtttgcatagatgattggcaggtggatctaggatccggcttccaacatgtggcagctctgggcctccctctgctgcctgctggtgttggccaatgcccggagcaggccctctttccatcccctgtcggatgagctggtcaactatgtcaacaaacggaataccacgtggcaggccgggcacaacttctacaacgtggacatgagctacttgaagaggctatgtggtaccttcctgggtgggcccaagccaccccagagagttatgtttaccgaggacctgaagctgcctgcaagcttcgatgcacgggaacaatggccacagtgtcccaccatcaaagagatcagagaccagggctcctgtggctcctgctgggccttcggggctgtggaagccatctctgaccggatctgcatccacaccaatgcgcacgtcagcgtggaggtgtcggcggaggacctgctcacatgctgtggcagcatgtgtggggacggctgtaatggtggctatcctgctgaagcttggaacttctggacaagaaaaggcctggtttctggtggcctctatgaatcccatgtagggtgcagaccgtactccatccctccctgtgagcaccacgtcaacggctcccggcccccatgcacgggggagggagatacccccaagtgtagcaagatctgtgagcctggctacagcccgacctacaaacaggacaagcactacggatacaattcctacagcgtctccaatagcgagaaggacatcatggccgagatctacaaaaacggccccgtggagggagctttctctgtgtattcggacttcctgctctacaagtcaggagtgtaccaacacgtcaccggagagatgatgggtggccatgccatccgcatcctgggctggggagtggagaatggcacaccctactggctggttgccaactcctggaacactgactggggtgacaatggcttctttaaaatactcagaggacaggatcactgtggaatcgaatcagaagtggtggctggaattccacgcaccgatcagtactgggaaaagatctaatctgccgtgggcctgtcgtgccagtcctgggggcgagatcggggtagaaatgcattttattctttaagttcacgtaagatacaagtttcagacagggtctgaaggactggattggccaaacatcagacctgtcttccaaggagaccaagtcctggctacatcccagcctgtggttacagtgcagacaggccatgtgagccaccgctgccagcacagagcgtccttccccctgtagactagtgccgtagggagtacctgctgccccagctgactgtggccccctccgtgatccatccatctccagggagcaagacagagacgcaggaatggaaagcggagttcctaacaggatgaaagttcccccatcagttcccccagtacctccaagcaagtagctttccacatttgtcacagaaatcagaggagagacggtgttgggagccctttggagaacgccagtctcccaggccccctgcatctatcgagtttgcaatgtcacaacctctctgatcttgtgctcagcatgattctttaatagaagttttattttttcgtgcactctgctaatcatgtgggtgagccagtggaacagcgggagacctgtgctagttttacagattgcctccttatgacgcggctcaaaaggaaaccaagtggtcaggagttgtttctgacccactgatctctactaccacaaggaaaatagtttaggagaaaccagcttttactgtttttgaaaaattacagcttcaccctgtcaagttaacaaggaatgcctgtgccaataaaagttttctccaacttgaagtctactctgatgggatctcagatcctttgtcactgcctatagacttgtagctgctgtctctctttgtccctgcagagaatcacgtcctggaactgcatgttcttgcgactcttgggacttcatcttaacttctcgctgccccagccatgttttcaaccatggcatccctcccccaattagttccctgtcatcctcgtcaaccttctctgtaagtgcctggtaagcttgcccttgcttaagaactcaaaacatagctgtgctctatttttttgttgttgttgtgactgacagagtgagattccgtctcccaggctggagtgcagtggcgccttctcagctcactgcaacctgcagcctcctagattcaagcgattctcctgcttcagccttccgagtagctgggatgacaggcactcaccaatatgcctgggtaatttttgtatttttaagtacatacaggatttcaccatgttggccaggctagtttcaaactcccggcctcaggtggtctgcctgcctcagcctcccaaagtgttgggattacaggcgtgagccactgggccctgcctgtattttttatcagccacaaatccagcaacaagctgaggattcagctcataaaacaggcttggtgtcttggtgatctcacataaccaagatgctaccccgtggggaaccacatccccctggatgccctccagccttggtttgggctggagtcagggcctgtatacagtattttgaatttgtatgccactggtttgcattgctggtcaggaactctagtgctttgcatagccctggtttagaaacatgttatagcagttcttggtatagagcaaactagaagaaccagcaatcattccactgtcctgccaaggtacacctcagtactccccttcccaactgaagtggtatgaggctagctctttccaaaagcattcaagtttggcttctgatgtgactcagaatttaggaaccagatgctagatcaaataagctctgaaaatctgaggaacattgtaggaaaggtttgttaagcatctcttaagtgccatgatgagcataacagccggccgtcgtggctcacgcctgtaatcccagcactttgggaggccaaggtgggaggatgacaaggtcaggagttcaagaccagcctggccaacatgctgaaacctcacctctactaaaaatacaaaaattagctgggcatggtggcacatgcctgtaatcccagctacttgggaggctgaggcaggagaatcgcttgaacccgggaggcggaggttgcagtgagccaagacagtgccagtgcactccagcctcggtgacagcgcaaggctccgtctcaataattaaaaaaaaaaaaaaaaaaaaaaaggccgggcgcagtggctcaagcctgtaatcccagcactttgggaggctgaggcgggcagatcacctgaggtcaggagttttgagatcagccttggcaacacggtgaaaccccatctctactaaaaatacaaaattagccaagcatgctggcacatgcctgtaatcccagctactcgggaggctgaggtacgagaatcgcttgaacctgggaggcagaggatgcagtgagccgagatcacgccattgcactccagcctgggggacaagagtgaatctgtgtctcaccaaaaaaaaaaagaaaaagaaagatgcttaacaaaggttaccataagccacaaattcataaccacttatccttccagtttcaagtagaatatattcataacctcaataaagttctccctgctcccaaa

SEQ ID NO: 72 - DNA, 2196 bp, HOMO SAPIENS
ctgggcgggtcatgcgccctggccttcgcgcatctcccaggttagctgcgtgtccgggtgctaggctgcagacccgccgccatgacgctgcgcgcggccgtcttcgaccttgacggggtgctggcgctgccagcggtgttcggcgtcctcggccgcacggaggaggccctggcgctgcccagaggacttctgaatgatgctttccagaaagggggaccagagggtgccactacccggcttatgaaaggagagatcacactttcccagtggataccactcatggaagaaaactgcaggaagtgctccgagaccgctaaagtctgcctccccaagaatttctccataaaagaaatctttgacaaggcgatttcagccagaaagatcaaccgccccatgctccaggcagctctcatgctcaggaagaaaggattcactactgccatcctcaccaacacctggctggacgaccgtgctgagagagatggcctggcccagctgatgtgtgagctgaagatgcactttgacttcctgatagagtcgtgtcaggtgggaatggtcaaacctgaacctcagatctacaagtttctgctggacaccctgaaggccagccccagtgaggtcgtttttttggatgacatcggggctaatctgaagccagcccgtgacttgggaatggtcaccatcctggtccaggacactgacacggccctgaaagaactggagaaagtgaccggaatccagcttctcaataccccggcccctctgccgacctcttgcaatccaagtgacatgagccatgggtacgtgacagtaaagcccagggtccgtctgcattttgtggagctgggctccggccctgctgtgtgcctctgccatggatttcccgagagttggtattcttggaggtaccagatccctgctctggcccaggcaggttaccgggtcctagctatggacatgaaaggctatggagagtcatctgctcctcccgaaatagaagaatattgcatggaagtgttatgtaaggagatggtaaccttcctggataaactgggcctctctcaagcagtgttcattggccatgactggggtggcatgctggtgtggtacatggctctcttctaccccgagagagtgagggcggtggccagtttgaatactcccttcataccagcaaatcccaacatgtcccctttggagagtatcaaagccaacccagtatttgattaccagctctacttccaagaaccaggagtggctgaggctgaactggaacagaacctgagtcggactttcaaaagcctcttcagagcaagcgatgagagtgttttatccatgcataaagtctgtgaagcgggaggactttttgtaaatagcccagaagagcccagcctcagcaggatggtcactgaggaggaaatccagttctatgtgcagcagttcaagaagtctggtttcagaggtcctctaaactggtaccgaaacatggaaaggaactggaagtgggcttgcaaaagcttgggacggaagatcctgattccggccctgatggtcacggcggagaaggacttcgtgctcgttcctcagatgtcccagcacatggaggactggattccccacctgaaaaggggacacattgaggactgtgggcactggacacagatggacaagccaaccgaggtgaatcagatcctcattaagtggctggattctgatgcccggaacccaccggtggtctcaaagatgtagaacgcagcgtgtgcccacgctcagcaggtgtgccatccttccacctgctggggcaccattcttagtatacagaggtggccttacacacatcttgcatggatggcagcattgttctgaaggggtttgcagaaaaaaaagattttctttacataaagtgaatcaaatttgacattattttagatcccagagaaatcaggtgtgattagttctccaggcatgaatgcatcgtccctttatctgtaagaacccttagtgtcctgtagggggacagaatggggtggccaggtggtgatttctctttgaccaatgcatagtttggcagaaaaatcagccgttcatttagaagaatcttagcagagattgggatgccttactcaataaagctaagatgactatgctgctggctgtctttgttcttggagaggtggagtgactgttcacggagaa

SEQ ID NO: 73 - DNA, 1730 bp, HOMO SAPIENS
gcggtggctgccgggactgagctcctagcacccgatcgggaagtggcgggcggagtcccgggtccagtcgccgcctcagctaccgccgctgccgccgccgccgccgccaccgccagtggtgagaccccgacctggcgggtcagcgctgggcgtgcgtgcgggcaggcgggggcgctgacgagaagcaggaagagggtgcagtgccggcgtgggcggccggccgaggcggaggcgcaggaagggggcggcgagtcgtgcgaggctgcccttctcactcagcattatggatccaagcctgttgagagaaagggagctgttcaaaaaacgagctctttctactcctgtagtagaaaaacgttcagcatcttctgagtcatcatcatcatcgtcaaagaagaagaaaacaaaggtagaacatggaggatcgtcaggctctaaacaaaattctgatcatagcaatggatcatttaacttgaaagctttgtcaggaagctctggatataagtttggtgttcttgctaagattgtgaattacatgaagacacggcatcagcgaggagatacgcatcctctaaccttagatgaaattttggatgaaacacaacatttagatattggactcaagcagaaacaatggctaatgactgaggctttagtcaacaatcccaaaattgaagtaatagatgggaagtatgctttcaagcccaagtacaacgtgagagataagaaggccctacttaggctcttagatcagcatgaccagcgaggattaggaggaattcttttagaagacatagaagaagcactgcccaattcccagaaagctgtcaaggctttgggggaccagatactatttgtaaatcgtcccgataagaagaaaatacttttcttcaatgataagagctgtcagttttctgtggatgaagaatttcagaaactgtggaggagtgtcactgtagattccatggacgaggagaaaattgaagaatatctgaagcgacagggtatttcttccatgcaggaatctggaccaaagaaagtggcccctattcagagaaggaaaaagcctgcttcacagaaaaagcgacgctttaagactcataacgaacacttggctggagtgctgaaggattactctgacattacttccagcaaatagggaacagttttgccctggaacagagttacagatacacaatcaagagtgttcttgctgatgctcggggtctgaagactgtcttcctatctgcttcttgcggctgaggagaggagcagttcagtttacaaaacaagtgcaaattaccaaactcaaagcttatttgagtagaatgggctcatgggcaatgtgatgttccctgttaaccttctgttactccctgggagaaaggcgctgagcgtggcatgcaggtgtctttgctgtgtttttctccacttctaaatggttcctggttcctttcttcctcgtttgttactttagagcaagtttgcccatagtcttgaatgcaatatttgtttattccaaaagaacatatttataataaaatcactgtagaaggatttttaagatgttagtgaattctgtttcttttcattctcggaaatggcaggaagcagctccagtctctgatttccatgggtcacgtgctggggatgtgatgaagcctgcagtctgcactgtgttgctgagcacatggatttcaccactggaacacaggtgtgctgcttgttag

SEQ ID NO: 74 - DNA, 1388 bp, HOMO SAPIENS
gatttatactcttaatgggtactttctgactgaattttatgagctcattctgaagaggctgacgattttactatctcatttttttcctttctccagaatgggttctgggtgggtcccctgggtggtggctctgctagtgaatctgacccgactggattcctccatgactcaaggcacagactctccagaagattttgtgattcaggcaaaggctgactgttacttcaccaacgggacagaaaaggtgcagtttgtggtcagattcatctttaacttggaggagtatgtacgtttcgacagtgatgtggggatgtttgtggcattgaccaagctggggcagccagatgctgagcagtggaacagccggctggatctcttggagaggagcagacaggccgtggatggggtctgtagacacaactacaggctgggcgcacccttcactgtggggagaaaagtgcaaccagaggtgacagtgtacccagagaggaccccactcctgcaccagcataatctgctgcactgctctgtgacaggcttctatccaggggatatcaagatcaagtggttcctgaatgggcaggaggagagagctggggtcatgtccactggccctatcaggaatggagactggacctttcagactgtggtgatgctagaaatgactcctgaacttggacatgtctacacctgccttgtcgatcactccagcctgctgagccctgtttctgtggagtggagagctcagtctgaatattcttggagaaagatgctgagtggcattgcagccttcctacttgggctaatcttccttctggtgggaatcgtcatccagctaagggctcagaaaggatatgtgaggacgcagatgtctggtaatgaggtctcaagagctgttctgctccctcagtcatgctaaggtcctcactgaagcttctctctctggagcctgaagtagtgatgagtagtctgggccctgggtgaggtaaaggacattcatgaggtcaatgttctgggaataactctcttccctgatccttggaggagcccgaactgattctggagctctgtgttctgagatcatgcatctcccacccatctgcccttctcccttctacgtgtacatcattaatccccattgccaagggcattgtccagaaactcccctgagaccttactccttccagccccaaatcatttacttttctgtggtccagccctactcctataagtcatgatctccaaagctttctgtcttccaactgcagtctccacagtcttcagaagacaaatgctcaggtagtcactgtttccttttcactgtttttaaaaaccttttattgtcaaataaaatggagatacaaaaaatgtaaaaaaaaaaaaaaaaa

SEQ ID NO: 75 - DNA, 4965 bp, HOMO SAPIENS
aaagggggaaaagaaagtgcggcggaaagtaagaggctcactggggaagactgccgggatccaggtctccggggtccgctttggccagaggcgcggaaggaagcagtgcccggcgacactgcacccatcccggctgcttttgctgcgccctctcagcttcccaagaaagggctttgacctgaagcttgaaattgagtttgggacaataatgtgtctcatggggaattgcatggactccttatcataagccaaatgctgaggtaaagctgcggaattgagtcgtcctccaagaagggagagaaaatgatgtcttgtgacatttccagataactggcatcgtcatgtgatcatcacctaagaactagaacatcagcaggccctagaagcctcactcttgcccctccctttaatatctcaaaggatgacacttctgtggtgtgtagtgagtctctacttttatggaatcctgcaaagtgatgcctcagaacgctgcgatgactggggactagacaccatgaggcaaatccaagtgtttgaagatgagccagctcgcatcaagtgcccactctttgaacacttcttgaaattcaactacagcacagcccattcagctggccttactctgatctggtattggactaggcaggaccgggaccttgaggagccaattaacttccgcctccccgagaaccgcattagtaaggagaaagatgtgctgtggttccggcccactctcctcaatgacactggcaactatacctgcatgttaaggaacactacatattgcagcaaagttgcatttcccttggaagttgttcaaaaagacagctgtttcaattcccccatgaaactcccagtgcataaactgtatatagaatatggcattcagaggatcacttgtccaaatgtagatggatattttccttccagtgtcaaaccgactatcacttggtatatgggctgttataaaatacagaattttaataatgtaatacccgaaggtatgaacttgagtttcctcattgccttaatttcaaataatggaaattacacatgtgttgttacatatccagaaaatggacgtacgtttcatctcaccaggactctgactgtaaaggtagtaggctctccaaaaaatgcagtgccccctgtgatccattcacctaatgatcatgtggtctatgagaaagaaccaggagaggagctactcattccctgtacggtctattttagttttctgatggattctcgcaatgaggtttggtggaccattgatggaaaaaaacctgatgacatcactattgatgtcaccattaacgaaagtataagtcatagtagaacagaagatgaaacaagaactcagattttgagcatcaagaaagttacctctgaggatctcaagcgcagctatgtctgtcatgctagaagtgccaaaggcgaagttgccaaagcagccaaggtgaagcagaaagtgccagctccaagatacacagtggaactggcttgtggttttggagccacagtcctgctagtggtgattctcattgttgtttaccatgtttactggctagagatggtcctattttaccgggctcattttggaacagatgaaaccattttagatggaaaagagtatgatatttatgtatcctatgcaaggaatgcggaagaagaagaatttgtattactgaccctccgtggagttttggagaatgaatttggatacaagctgtgcatctttgaccgagacagtctgcctgggggaattgtcacagatgagactttgagcttcattcagaaaagcagacgcctcctggttgttctaagccccaactacgtgctccagggaacccaagccctcctggagctcaaggctggcctagaaaatatggcctctcggggcaacatcaacgtcattttagtacagtacaaagctgtgaaggaaacgaaggtgaaagagctgaagagggctaagacggtgctcacggtcattaaatggaaaggggaaaaatccaagtatccacagggcaggttctggaagcagctgcaggtggccatgccagtgaagaaaagtcccaggcggtctagcagtgatgagcagggcctctcgtattcatctttgaaaaatgtatgaaaggaataatgaaaagggtaaaaagaacaaggggtgctccaggaagaaagagtccccccagtcttcattcgcagtttatggtttcataggcaaaaataatggtctaagcctcccaatagggataaatttagggtgactgtgtggctgactattctgcttcctcaggcaacactaaagtttagaaagatatcatcaacgttctgtcaccagtctctgatgccactatgttctttgcaggcaaagacttgttcaatgcgaatttccccttctacattgtctatccctgtttttatatgtctccattctttttaaaatcttaacatatggagcagcctttcctatgaatttaaatatgcctttaaaataagtcactgttgacagggtcatgagtttccgagtatagttttctttttatcttatttttactcgtccgttgaaaagataatcaaggcctacattttagctgaggataatgaacttttttcctcattcggctgtataatacataaccacagcaagactgacatccacttaggatgatacaaagcagtgtaactgaaaatgtttcttttaattgatttaaaggacttgtcttctataccacccttgtcctcatctcaggtaatttatgaaatctatgtaaacttgaaaaatatttcttaatttttgtttttgctccagtcaattcctgattatccacaggtcaacccacattttttcattccttctccctatctgcttatatcgcattgctcatttagagtttgcaggaggctccatactaggttcagtctgaaagaaatctcctaatggtgctatagagagggaggtaacagaaagactcttttagggcatttttctgactcatgaaaagagcacagaaaaggatgtttggcaatttgtcttttaagtcttaaccttgctaatgtgaatactgggaaagtgattttttctcactcgtttttgttgctccattgtaaagggcggaggtcagtcttagtggccttgagagttgcttttggcattaatattctaagagaattaactgtatttcctgtcacctattcactagtgcaggaaatatacttgctccaaataagtcagtatgagaagtcactgtcaatgaaagttgttttgtttgttttcagtaatattttgctgtttttaagacttggaaaactaagtgcagagtttacagagtggtaaatatctatgttacatgtagattatacatatatatacacacgtgtatatgagatatatatcttatatctccacaaacacaaattatatatatacatatccacacacatacattacatatatctgtgtatataaatccacatgcacatgaaatatatatatatatataatttgtgtgtgtgtatgtgtatgtatatgactttaaatagctatgggtacaatattaaaaaccactggaactcttgtccagtttttaaattatgtttttactggaatgtttttgtgtcagtgttttctgtacatattatttgttaattcacagctcacagagtgatagttgtcatagttcttgccttccctaagtttatataaataacttaagtattgctacagtttatctaggttgcagtggcatctgctgtgcacagagcttccatggtcactgctaagcagtagccagccatcgggcattaattgatttcctactatattcccagcagacacatttagaaactaagctatgttaacctcagtgctcaactatttgaactgttgagtgataaaggaaacaaatataactgtaaatgaatcttggtatcctgtgaaacagaataattcgtaatttaagaaagcccttatcccggtaacatgaatgttgatgaacaaatgtaaaattatatcctatatttaagtacccataataaatcatttccctctataagtgttattgattattttaaattgaaaaaagtttcacttggatgaaaaaagtagaaaagtaggtcattcttggatctacttttttttagccttattaatatttttccctattagaaaccacaattactccctctattaacccttcacttactagaccagaaaagaacttattccagataagctttgaatatcaattcttacataaactttaggcaaacagggaatagtctagtcaccaaaggaccattctcttgccaatgctgcattccttttgcacttttggattccatatttatcccaaatgctgttgggcacccctagaaataccttgatgttttttctatttatatgcctgcctttggtacttaattttacaaatgctgtaatataaagcatatcaagtttatgtgatacgtatcattgcaagagaatttgtttcaagatttttttttaatgttccagaagatggccaatagagaacattcaagggaaatggggaaacataatttagagaacaagaacaaaccatgtctcaaatttttttaaaaaaaattaatggttttaaatatatgctatagggacgttccatgcccaggttaacaaagaactgtgatatatagagtgtctaattacaaaatcatatacgatttatttaattctcttctgtattgtaacttagatgattcccaaggactctaataaaaaatcacttcattgtatttggaaacaaaaacatcattcattaattacttattttctttccataggttttaatattttgagagtgtcttttttatttcattcatgaacttttgtatttttcatttttcatttgatttgtaaatttacttatgttaaaaataaaccatttattttcagctttgaattttaaaaaaaaaaaaaaaaaa

SEQ ID NO: 76 - DNA, 2900 bp, HOMO SAPIENS
gcccggcaggttggcggaccggcgggaggcgcagcctgggcagagctcagcttggtcccgccgcccggccggtgctccctggcgcagccacgcaggcgcaccgcagacagacccctctgccatgaaccagtccatcccagtggctcccaccccaccccgccgcgtgcggctgaagccctggctggtggcccaggtgaacagctgccagtacccagggcttcaatgggtcaacggggaaaagaaattattctgcatcccctggaggcatgccacaaggcatggtcccagccaggacggagataacaccatcttcaaggcctgggccaaggagacagggaaatacaccgaaggcgtggatgaagccgatccggccaagtggaaggccaacctgcgctgtgcccttaacaagagccgggacttccgcctcatctacgacgggccccgggacatgccacctcagccctacaagatctacgaggtctgctccaatggccctgctcccacagactcccagccccctgaggattactcttttggtgcaggagaggaggaggaagaagaggaagagctgcagaggatgttgccaagcctgagcctcacagatgcagtgcagtctggcccccacatgacaccctattctttactcaaagaggatgtcaagtggccgcccactctgcagccgcccactctgcggccgcctactctgcagccgcccactctgcagccgcccgtggtgctgggtccccctgctccagaccccagccccctggctcctccccctggcaaccctgctggcttcagggagcttctctctgaggtcctggagcctgggcccctgcctgccagcctgccccctgcaggcgaacagctcctgccagacctgctgatcagcccccacatgctgcctctgaccgacctggagatcaagtttcagtaccgggggcggccaccccgggccctcaccatcagcaacccccatggctgccggctcttctacagccagctggaggccacccaggagcaggtggaactcttcggccccataagcctggagcaagtgcgcttccccagccctgaggacatccccagtgacaagcagcgcttctacacgaaccagctgctggatgtcctggaccgcgggctcatcctccagctacagggccaggacctttatgccatccgcctgtgtcagtgcaaggtgttctggagcgggccttgtgcctcagcccatgactcatgccccaaccccatccagcgggaggtcaagaccaagcttttcagcctggagcattttctcaatgagctcatcctgttccaaaagggccagaccaacaccccaccacccttcgagatcttcttctgctttggggaagaatggcctgaccgcaaaccccgagagaagaagctcattactgtacaggtggtgcctgtagcagctcgactgctgctggagatgttctcaggggagctatcttggtcagctgatagtatccggctacagatctcaaacccagacctcaaagaccgcatggtggagcaattcaaggagctccatcacatctggcagtcccagcagcggttgcagcctgtggcccaggcccctcctggagcaggccttggtgttggccaggggccctggcctatgcacccagctggcatgcaataacaaggctgcagacggtgactggccctggcttcctgggtggcggtgcggactgatgtggagatgtgacagccccgatgagcacctggctggctgcagggtcctacctctgggtttcctggaagtggatttgggccaagaaggagagggagaaaggcccgagcccctgccttcccgggcctttctctcctgggctgtctctggtctggtcagcctggctctcgggaaattcagccatgagcagggaaagaactctcccaaccctggggcctagctgtataggaggaattgcctaagggtggcccactcttgtgattgccccatttcctctggcaacaaaagccagagtgttgtgggccaagtccccccacagggcctctgcagggcatggccctgatttccctggtttgagactcacttcctcatctccctgtcctctgagataatatgagtgagcacttaggtatcatatcagatgctcaaggctggcagctacccccttcttgagagtccaagaacctggagcagaaataatttttatgtatttttggattaatgaatgttaaaaacagactcagctgtttctttccttttactactaccagttgctcccatgctgctccaccaggccctgtttcggatgccaactggcccactccccaagcacttgcccccagcttgcgaccattggcactgggagggcctggcttctgggctgatgggtcagttgggccttcataaacactcacctggctggctttgccttccaggaggaagctggctgaagcaagggtgtggaattttaaatgtgtgcacagtctggaaaactgtcagaatcagttttcccataaaagggtgggctagcattgcagctgcatttgggaccattcaaatctgtcactctcttgtgtatattcctgtgctattaaatatatcagggcagtgcatgtaaatcatcctgatatatttaatatatttattatattgtcccccgaggtggggacagtgagtgagttctcttagtccccccagagctggttgttaaagagcctggcacctacccgctctcacttcatctgtgtcatctctgcacactccagcccactttctgccttcagccattgagtggaagctgccccaggcccttaccaggtgcagatgcccaatcttgatgcccagccatcagaactgtgagccaaataaacctttttctgtataaaaaaaaaaaaaaaaaaaa

SEQ ID NO: 77 - DNA, 2598 bp, HOMO SAPIENS
aagtgcccggcaggttggcggaccggcgggaggcgcagcctgggcagagctcagcttggtcccgccgcccggccggtgctccctggcgcagccacgcaggcgcaccgcagacagacccctctgccatgaaccagtccatcccagtggctcccaccccaccccgccgcgtgcggctgaagccctggctggtggcccaggtgaacagctgccagtacccagggcttcaatgggtcaacggggaaaagaaattattctgcatcccctggaggcatgccacaaggcatggtcccagccaggacggagataacaccatcttcaaggcctgggccaaggagacagggaaatacaccgaaggcgtggatgaagccgatccggccaagtggaaggccaacctgcgctgtgcccttaacaagagccgggacttccgcctcatctacgacgggccccgggacatgccacctcagccctacaagatctacgaggtctgctccaatggccctgctcccacagactcccagccccctgaggattactcttttggtgcaggagaggaggaggaagaagaggaagagctgcagaggatgttgccaagcctgagcctcacaggccgcctactctgcagccgcccactctgcagccgcccgtggtgctgggtccccctgctccagaccccagccccctggctcctccccctggcaaccctgctggcttcagggagcttctctctgaggtcctggagcctgggcccctgcctgccagcctgccccctgcaggcgaacagctcctgccagacctgctgatcagcccccacatgctgcctctgaccgacctggagatcaagtttcagtaccgggggcggccaccccgggccctcaccatcagcaacccccatggctgccggctcttctacagccagctggaggccacccaggagcaggtggaactcttcggccccataagcctggagcaagtgcgcttccccagccctgaggacatccccagtgacaagcagcgcttctacacgaaccagctgctggatgtcctggaccgcgggctcatcctccagctacagggccaggacctttatgccatccgcctgtgtcagtgcaaggtgttctggagcgggccttgtgcctcagcccatgactcatgccccaaccccatccagcgggaggtcaagaccaagcttttcagcctggagcattttctcaatgagctcatcctgttccaaaagggccagaccaacaccccaccacccttcgagatcttcttctgctttggggaagaatggcctgaccgcaaaccccgagagaagaagctcattactgtacaggtggtgcctgtagcagctcgactgctgctggagatgttctcaggggagctatcttggtcagctgatagtatccggctacagatctcaaacccagacctcaaagaccgcatggtggagcaattcaaggagctccatcacatctggcagtcccagcagcggttgcagcctgtggcccaggcccctcctggagcaggccttggtgttggccaggggccctggcctatgcacccagctggcatgcaataacaaggctgcagacggtgactggccctggcttcctgggtggcggtgcggactgatgtggagatgtgacagccccgatgagcacctggctggctgcagggtcctacctctgggtttcctggaagtggatttgggccaagaaggagagggagaaaggcccgagcccctgccttcccgggcctttctctcctgggctgtctctggtctggtcagcctggctctcgggaaattcagccatgagcagggaaagaactctcccaaccctggggcctagctgtataggaggaattgcctaagggtggcccactcttgtgattgccccatttcctctggcaacaaaagccagagtgttgtgggccaagtccccccacagggcctctgcagggcatggccctgatttccctggtttgagactcacttcctcatctccctgtcctctgagataatatgagtgagcacttaggtatcatatcagatgctcaaggctggcagctacccccttcttgagagtccaagaacctggagcagaaataatttttatgtatttttggattaatgaatgttaaaaacagactcagctgtttctttccttttactactaccagttgctcccatgctgctccaccaggccctgtttcggatgccaactggcccactccccaagcacttgcccccagcttgcgaccattggcactgggagggcctggcttctgggctgatgggtcagttgggccttcataaacactcacctggctggctttgctttccaggaggaagctggctgaagcaagggtgtggaattttaaatgtgtgcacagtctggaaaactgtcagaatcagttttcccataaaagggtgggctagcattgcagctgcatttgggaccattcaaatctgtcactctcttgtgtatattcctgtgctattaaatatatcagggcagtgcatgtaaatcatcctgatatatttaatatatttattatattgtcccccgaggtggggacagtgagtgagttctctta

SEQ ID NO: 78 - DNA, 1586 bp, HOMO SAPIENS
agaccgcgcggtgggtgggggcggggtagtgggcggggcatcggcaggctaggttttctccgcgcagcgccagtcgcagaggaagatggcgccgcggagggtcaggtcgtttctgcgcgggctcccggcgctgctactgctgctgctcttcctcgggccctggcccgctgcgagccacggcggcaagtactcgcgggagaagaaccagcccaagccgtccccgaaacgcgagtccggagaggagttccgcatggagaagttgaaccagctgtgggagaaggcccagcgactgcatcttcctcccgtgaggctggccgagctccacgctgatctgaagatacaggagagggacgaactcgcctggaagaaactaaagcttgacggcttggacgaagatggggagaaggaagcgagactcatacgcaacctcaatgtcatcttggccaagtatggtctggacggaaagaaggacgctcggcaggtgaccagcaactccctcagtggcacccaggaagacgggctggatgaccccaggctggaaaagctgtggcacaaggcgaagacctctgggaaattctccggcgaagaactggacaagctctggcgggagttcctgcatcacaaagagaaagttcacgagtacaacgtcctgctggagaccctgagcaggaccgaagaaatccacgagaacgtcattagcccctcggacctgagcgacatcaagggcagcgtcctgcacagcaggcacacggagctgaaggagaagctgcgcagcatcaaccagggcctggaccgcctgcgcagggtcagccaccagggctacagcactgaggctgagttcgaggagcccagggtgattgacctgtgggacctggcgcagtccgccaacctcacggacaaggagctggaggcgttccgggaggagctcaagcacttcgaagccaaaatcgagaagcacaaccactaccagaagcagctggagattgcgcacgagaagctgaggcacgcagagagcgtgggcgacggcgagcgtgtgagccgcagccgcgagaagcacgccctgctggaggggcggaccaaggagctgggctacacggtgaagaagcatctgcaggacctgtccggcaggatctccagagctcggcacaacgaactctgaaggcattggggagcccagcccggcagggaagaggccagcgtgaaggacctgggctcttggccgtggcatttccgtggacagcccgccgtcagggtggctggggctggcacgggtgtcgaggcaggaaggattgtttctggtgactgcagccgctgccgtcgcgacacagggcttggtggtggtagcatttgggtctgagatcggcccagctctgactgaaggggcttggcttccactcagcatcagcgtggcagtcaccaccccagtgaggacctcgatgtccagctgctgtcaggtctgatagtcctctgctaaaacaacacgatttacataaaaaatcttacacatctgccaccggaaataccatgcacagagtccttaaaaaatagagtgcagtatttaaaccacccgaaaaaaaaaaaaaaaa

SEQ ID NO: 79 - DNA, 4639 bp, HOMO SAPIENS
gagcgcgcacgtcccggagcccatgccgaccgcaggcgccgtatccgcgctcgtctagcagccccggttacgcggttgcacgtcggccccagccctgaggagccggaccgatgtggaaactgctgcccgccgcgggcccggcaggaggagaaccatacagacttttgactggcgttgagtacgttgttggaaggaaaaactgtgccattctgattgaaaatgatcagtcgatcagccgaaatcatgctgtgttaactgctaacttttctgtaaccaacctgagtcaaacagatgaaatccctgtattgacattaaaagataattctaagtatggtacctttgttaatgaggaaaaaatgcagaatggcttttcccgaactttgaagtcgggggatggtattacttttggagtgtttggaagtaaattcagaatagagtatgagcctttggttgcatgctcttcttgtttagatgtctctgggaaaactgctttaaatcaagctatattgcaacttggaggatttactgtaaacaattggacagaagaatgcactcaccttgtcatggtatcagtgaaagttaccattaaaacaatatgtgcactcatttgtggacgtccaattgtaaagccagaatattttactgaattcctgaaagcagttgagtccaagaagcagcctccacaaattgaaagtttttacccacctcttgatgaaccatctattggaagtaaaaatgttgatctgtcaggacggcaggaaagaaaacaaatcttcaaagggaaaacatttatatttttgaatgccaaacagcataagaaattgagttccgcagttgtctttggaggtggggaagctaggttgataacagaagagaatgaagaagaacataatttctttttggctccgggaacgtgtgttgttgatacaggaataacaaactcacagaccttaattcctgactgtcagaagaaatggattcagtcaataatggatatgctccaaaggcaaggtcttagacctattcctgaagcagaaattggattggcggtgattttcatgactacaaagaattactgtgatcctcagggccatcccagtacaggattaaagacaacaactccaggaccaagcctttcacaaggcgtgtcagttgatgaaaaactaatgccaagcgccccagtgaacactacaacatacgtagctgacacagaatcagagcaagcagatacatgggatttgagtgaaaggccaaaagaaatcaaagtctccaaaatggaacaaaaattcagaatgctttcacaagatgcacccactgtaaaggagtcctgcaaaacaagctctaataataatagtatggtatcaaatactttggctaagatgagaatcccaaactatcagctttcaccaactaaattgccaagtataaataaaagtaaagatagggcttctcagcagcagcagaccaactccatcagaaactactttcagccgtctaccaaaaaaagggaaagggatgaagaaaatcaagaaatgtcttcatgcaaatcagcaagaatagaaacgtcttgttctcttttagaacaaacacaacctgctacaccctcattgtggaaaaataaggagcagcatctatctgagaatgagcctgtggacacaaactcagacaataacttatttacagatacagatttaaaatctattgtgaaaaattctgccagtaaatctcatgctgcagaaaagctaagatcaaataaaaaaagggaaatggatgatgtggccatagaagatgaagtattggaacagttattcaaggacacaaaaccagagttagaaattgatgtgaaagttcaaaaacaggaggaagatgtcaatgttagaaaaaggccaaggatggatatagaaacaaatgacactttcagtgatgaagcagtaccagaaagtagcaaaatatctcaagaaaatgaaattgggaagaaacgtgaactcaaggaagactcactatggtcagctaaagaaatatctaacaatgacaaacttcaggatgatagtgagatgcttccaaaaaagctgttattgactgaatttagatcactggtgattaaaaactctacttccagaaatccatctggcataaatgatgattatggtcaactaaaaaatttcaagaaattcaaaaaggtcacatatcctggagcaggaaaacttccacacatcattggaggatcagatctaatagctcatcatgctcgaaagaatacagaactagaagagtggctaaggcaggaaatggaggtacaaaatcaacatgcaaaagaagagtctcttgctgatgatctttttagatacaatccttatttaaaaaggagaagataactgaggattttaaaaagaagccatggaaaaacttcctagtaagcatctacttcaggccaacaaggttatatgaatatatagtgtatagaagcgatttaagttacaatgttttatggcctaaatttattaaataaaatgcacaaaactttgattcttttgtatgtaacaattgtttgttctgttttcaggctttgtcattgcatctttttttcatttttaaatgtgttttgtttattaaatagttaatatagtcacagttcaaaattctaaatgtacgtaaggtaaagactaaagtcacccttccaccattgtcctagctacttggttcccctcagaaaaaaattcatgatactcatttcttatgaatctttccagggatttttgagtcctattcaaattcctatttttaaataatttcctacacaaatgatagcataacatatgcagtgttctacaccttgcttttttacttagtagattaaaaattataggaatatcaatataatgtttttaatattttttcttttccattatgctgtagtcttacctaaactctggtgatccaaacaaaatggcttcagtggtgcagatgtcacctacatgttattctagtactagaaactgaagaccatgtggagacttcatcaaacatgggtttagttttcaccagaatggaaagacctgtacccctttttggtggtcttactgagctgggtgggtgtctgttttgagcttatttagagtcctagttttcctacttataaagtagaaatggtgagattgttttctttttctaccttaaagggagatggtaagaaacaatgaatgtcttttttcaaactttattgacaagtgattttcaagtctgtgttcaaaaatatattcatgtacctgtgatccagcaagaagggagttccagtcaagagtcactacaactgattagttgtttagagaatgagaaatggaacagtgaggaatggaggccatatttccatgacttcccttgtaaacagaagcaacagaagggacaagaggctggcctctacatcactctcaccttccaaatcttgtggaagtgcatctacttgccagaaccaaattaacttacttccaagttctggctgcttgcaggtggaactccagctgcaagggagttagggaaatgaaggtctttttttaaaagcttctcagccttcctagggaacagaaattgggtgagccaatctgcaatttctactacaggcattgagaccagttagattattgaaatattatagagagttatgaacacttaaattatgatagtggtatgacattggatagaacatgggatactttagaagtagaattgacagggcatattagttgatgaaatggagtcatttgagtctcttaatagccatgtatcataattaccaagtgaagctggtggaacatatggtctccattttacagttaaggaatataatggacagattaatattgttctctgtcatgcccacaatccctttctaaggaagactgccctactatagcagtttttatatttgtcaatttatgaatataatgaatgagagttctggtacctcctgtctttacaaatattggtgttgtcagtatttttcctttttaaccattccaatcggtgtgtagtgatgtttcattttggttttaatttgtatatccctgatagctataattgggtcatagaaattctttatacattctagatgcaagtctcttgtcggatatatgtattgagatattacacctagtctgtggcttgactgttttctttatgtcttttgatgaatagaagttttaaattttgacaaggtcaaatttatttttttcttttgtttgatattttttctctccaatttaaccccaagatttcagatattctgctctattatataaactttatatttttatatttgtgatctaccttgaattgatatgtatgttgtgaattatggatcagggttctttttttcccccatacaagtatccagtcattgtaacactgtttattgaaagaattatcctttcctcattaaattaccttgccaattagtaaaaaatcaattaaccataatggtggatctgtttctggactttctgtttggttacactgaaatgtttgtccatccttgcactcactcataccatactgccttgaattactgtagctgcatagatgctccttaagttgggattacattgtaataaacgcaatgtaagttaaaaaaaaaaaaaaaaaa

SEQ ID NO: 80 - DNA, 3836 bp, HOMO SAPIENS
actttgggtttcgaaatgttcgctggctgttccgagaatcagtccgggtcacgttggtgcctctcctttcctgttctgattggttgcttacgtgagcgtgactactttcttgcctcatgattggctgaaatcagtagcgtcatcggcggccgggagggcggagggacgagggaagtcggcgagagggagactgggttgggggaggggttcaggcctgttccccgcggctgcggcagcaccagggccggccgccaccgcctctagaacgcggaggaggtgggtcctgggaagcgggatgtccatcgctccagcttggtggtgaatgctgaggagagtcactgttgctgcagtctgtgccacccggaggaagttgtgtgaggccgggcgggagctcgcggcgctctggggaatcgaaacgcggggtcggtgcgaagactctgctgctgccagaccctttcctattctggccatgcctggaaggaacaaggcgaagtctacctgcagctgccctgacctgcagcccaatggacaggatctgggcgagaacagccgggttgcccgtctaggagcggatgaatctgaggaagagggacggagggggtctctcagtaatgctggggaccctgagatcgtcaagtctcccagcgaccccaagcaataccgatacatcaaattacagaatggcttgcaggcacttctgatttcagacctaagtaatatggaaggtaaaacaggaaatacaacagatgatgaagaagaagaggaggtggaggaagaagaagaagatgatgatgaagattctggagctgaaatagaagatgacgatgaagagggttttgatgatgaagatgagtttgatgatgaacatgatgatgatcttgatactgaggataatgaattggaagaattagaagagagagcagaagctagaaaaaaaactactgaaaaacagtctgcagcggctctttgtgttggagttgggagtttcgctgatccagatgacctgccggggctggcacactttttggagcacatggtattcatgggtagtttgaaatatccagatgagaatggatttgatgccttcctgaagaagcatgggggtagtgataatgcctcaactgattgtgaacgcactgtctttcagtttgatgtccagaggaagtacttcaaggaagctcttgatagatgggcgcagttcttcatccacccactaatgatcagagatgcaattgaccgtgaagttgaagctgttgatagtgaatatcaacttgcaaggccttctgatgcaaacagaaaggaaatgttgtttggaagccttgctagacctggacatcctatgggaaaatttttttggggaaatgctgagacgctcaagcatgagccaagaaagaataatattgatacacatgctagattgagagaattctggatgcgttactactcttctcattacatgactttagtggttcaatccaaagaaacactggatactttggaaaagtgggtgactgaaatcttctctcagataccaaacaatgggttacccagaccaaactttggccatttaacggatccatttgacacaccagcatttaacaaactttatagagttgttccaatcagaaaaattcatgctctgaccatcacatgggcacttcctcctcaacagcaacattacagggtgaagccacttcattatatatcctggctggttggacatgaaggcaaaggcagcattctttctttccttaggaaaaaatgctgggctcttgcactgtttggtggaaatggtgagacaggatttgagcaaaattctacttattcagtgttcagcatttctattacattgactgatgagggttatgaacatttttatgaggttgcttacactgtctttcagtatttaaaaatgctgcagaagctaggcccagaaaaaagaatttttgaagagattcggaaaattgaggataatgaatttcattaccaagaacagacagatccagttgagtatgtggaaaacatgtgtgagaacatgcagctgtacccattgcaggacattctcactggagatcagcttctttttgaatacaagccagaagtcattggtgaagccttgaatcagctagttcctcaaaaagcaaatcttgttttactgtctggtgctaatgagggaaaatgtgacctcaaggagaaatggtttggaactcaatatagtatagaagatattgaaaactcttgggctgaactgtggaatagtaatttcgaattaaatccagatcttcatcttccagctgaaaacaagtacatagccacggactttacgttgaaggctttcgattgcccggaaacagaatacccagttaaaattgtgaatactccacaaggttgcctgtggtataagaaagacaacaaattcaaaatccccaaagcatatatacgtttccatctaatttcaccgttgatacagaaatctgcagcaaatgtggtcctctttgatatctttgtcaatatccttacgcataaccttgcggaaccagcttatgaagcagatgtggcacagctggagtataaactggtagctggagaacatggtttaattattcgagtgaaaggatttaaccacaaactacctctactgtttcagctcattattgactacttagctgagttcaattccacaccagctgtctttacaatgataactgagcagttgaagaagacctactttaacatcctcatcaagcccgagactttggccaaagatgtacggcttttaatcttggaatatgcccgttggtctatgattgacaagtaccaggctttgatggacggcctttcccttgagtctctgctgagcttcgtcaaagaattcaaatcccagctctttgtggagggcctggtacaagggaatgtcacaagcacagaatctatggatttcctgaaatatgttgttgacaaactaaacttcaagcctctggagcaggagatgcctgtgcagttccaggtggtagagctgcccagtggccaccatctatgcaaagtgaaagctctgaacaagggtgatgccaactctgaagtcactgtgtactaccagtcaggtaccaggagtctaagagaatatacgcttatggagctgcttgtgatgcacatggaagaaccttgttttgacttccttcgaaccaagcagacccttgggtaccatgtctaccctacctgtaggaacacatccgggattctaggattttctgtcactgtggggactcaggcaaccaaatacaattctgaagttgttgataagaagatagaagagtttctttctagctttgaggagaagattgagaacctcactgaagaggcattcaacacccaggtcacagctctcatcaagctgaaggagtgtgaggatacccaccttggggaggaggtggataggaactggaatgaagtggttacacagcagtacctctttgaccgccttgcccacgagattgaagcactgaagtcattctcaaaatcagacctggtcaactggttcaaggcccatagagggccaggaagtaaaatgctcagcgttcatgttgttggatatgggaagtatgaactggaagaggatggtaccccttctagtgaggattcaaattcttcttgtgaagtgatgcagctgacctacctgccaacctctcctctgctggcagattgtatcatccccattactgatatcagggctttcacaacaacactcaaccttctcccctaccataaaatagtcaaataaataaactgcagtcacgttggcctgaagcaatgtgtattttaaaaaaaaaaaaaaaaaa

SEQ ID NO: 81 - DNA, 5493 bp, HOMO SAPIENS
gctgagctccagctgtgccagaggcacccgagccctgagagtccgccgccaacgcgcaggtgctagcggccccttcgccctgcagcccctttgcttttactctgtccaaagttaacatgtcactgaaaaacgagccacgggtaaatacctctgcactgcagaaaattgctgctgacatgagtaatatcatagaaaatctggacacgcgggaactccactttgagggagaggaggtagactacgacgtgtctcccagcgatcccaagatacaagaagtgtatatccctttctctgctatttataacactcaaggatttaaggagcctaatatacagacgtatctctccggctgtccaataaaagcacaagttctggaagtggaacgcttcacatctacaacaagggtaccaagtattaatctttacactattgaattaacacatggggaatttaaatggcaagttaagaggaaattcaagcattttcaagaatttcacagagagctgctcaagtacaaagcctttatccgcatccccattcccactagaagacacacgtttaggaggcaaaacgtcagagaggagcctcgagagatgcccagtttgccccgttcatctgaaaacatgataagagaagaacaattccttggtagaagaaaacaactggaagattacttgacaaagatactaaaaatgcccatgtatagaaactatcatgccacaacagagtttcttgatataagccagctgtctttcatccatgatttgggaccaaagggcatagaaggtatgataatgaaaagatctggaggacacagaataccaggcttgaattgctgtggtcagggaagagcctgctacagatggtcaaaaagatggttaatagtgaaagattcctttttattgtatatgaaaccagacagcggtgccattgccttcgtcctgctggtagacaaagaattcaaaattaaggtggggaagaaggagacagaaacgaaatatggaatccgaattgataatctttcaaggacacttattttaaaatgcaacagctatagacatgctcggtggtggggaggggctatagaagaattcatccagaaacatggcaccaactttctcaaagatcatcgatttgggtcatatgctgctatccaagagaatgctttagctaaatggtatgttaatgccaaaggatattttgaagatgtggcaaatgcaatggaagaggcaaatgaagagatttttatcacagactggtggctgagtccagaaatcttcctgaaacgcccagtggttgagggaaatcgttggaggttggactgcattcttaaacgaaaagcacaacaaggagtgaggatcttcataatgctctacaaagaggtggaactcgctcttggcatcaatagtgaatacaccaagaggactttgatgcgtctacatcccaacataaaggtgatgagacacccggatcatgtgtcatccaccgtctatttgtgggctcaccatgagaagcttgtcatcattgaccaatcggtggcctttgtgggagggattgacctggcctatggaaggtgggacgacaatgagcacagactcacagacgtgggcagtgtgaagcgggtcacttcaggaccgtctctgggttccctcccacctgccgcaatggagtctatggaatccttaagactcaaagataaaaatgagcctgttcaaaacctacccatccagaagagtattgatgatgtggattcaaaactgaaaggaataggaaagccaagaaagttctccaaatttagtctctacaagcagctccacaggcaccacctgcacgacgcagatagcatcagcagcattgacagcacctccaataccgggtccatccgtagtttacagacaggtgtgggagagctgcatggggaaaccagattctggcatggaaaggactactgcaatttcgtcttcaaagactgggttcaacttgataaaccttttgctgatttcattgacaggtactccacgccccggatgccctggcatgacattgcctctgcagtccacgggaaggcggctcgtgatgtggcacgtcacttcatccagcgctggaacttcacaaaaattatgaaatcaaaatatcggtccctttcttatccttttctgcttccaaagtctcaaacaacagcccatgagttgagatatcaagtgcctgggtctgtccatgctaacgtacagttgctccgctctgctgctgattggtctgctggtataaagtaccatgaagagtccatccacgccgcttacgtccatgtgatagagaacagcaggcactatatctatatcgaaaaccagtttttcataagctgtgctgatgacaaagttgtgttcaacaagataggcgatgccattgcccagaggatcctgaaagctcacagggaaaaccagaaataccgggtatatgtcgtgataccacttctgccagggttcgaaggagacatttcaaccggcggaggaaatgctctacaggcaatcatgcacttcaactacagaaccatgtgcagaggagaaaattccatccttggacagttaaaagcagagcttggtaatcagtggataaattacatatcattctgtggtcttagaacacatgcagagctcgaaggaaacctagtaactgagcttatctatgtccacagcaagttgttaattgctgatgataacactgttattattggctctgccaacataaatgaccgcagcatgctgggaaagcgtgacagtgaaatggctgtcattgtgcaagatacagagactgttccttcagtaatggatggaaaagagtaccaagctggccggtttgcccgaggacttcggctacagtgctttagggttgtccttggctatcttgatgacccaagtgaggacattcaggatccagtgagtgacaaattcttcaaggaggtgtgggtttcaacagcagctcgaaatgctacaatttatgacaaggttttccggtgccttcccaatgatgaagtacacaatttaattcagctgagagactttataaacaagcccgtattagctaaggaagatcccattcgagctgaggaggaactgaagaagatccgtggatttttggtgcaattccccttttatttcttgtctgaagaaagcctactgccttctgttgggaccaaagaggccatagtgcccatggaggtttggacttaagagatattcattggcagctcaaagacttccaccctggagaccacactgcacacagtgacttcctggggatgtcatagccaaagccaggcctgacgcattctcgtatccaacccaaggaccttttggaatgactggggagggctgcagtcacattgatgtaaggactgtaaacatcagcaagactttataattccttctgcctaacttgtaaaaagggggctgcattcttgttggtagcatgtactctgttgagtaaaacacatattcaaattccgtataccaaaatccatttcctttgtaacaagaatttaccagtaactgtgatctaggttgccaaaagttgtctgaatctccttattcttctctgatcttcatttatgcagccaatgtctagctggacctgccctcatcttgcagttcatacaggcactgtttgagagattgtttattattagatgttgtaatgctgcttcaagattcttcatggttacatgggatgcccctgctcatctggtcctgaagtagtaacattcacccaaatgaggatatagtcattattccttttcagtcactgtacgaacacggcagactttagcctacacagtagactgtgttaggcacttctggtaacattgacactgtatcttgacaccactaagcaacaggaaggaataaattccaatattgagacagagatttatttcattttgctcccaaaggcactgacaacatgagtccttgtgattaggcccacctgatcaaatgtaaaaacatgcatgggatatttgattacgtaacaaccagctaaaactgagagcacacagccttcggaaacccccaaggtgtcgaggaggatcagatccagataagagaagatgattccttctagtcctgtaaaatttcctgtcatccttagctgctgggttgattgaaatttgatctctacatttcaaaatcaaactagtgaatacagtttgtctttcaagagaatcagaggcatcgtaactcctaccaagttagtaagtatgagtctaaccttgtttgacattcaggtcttctgctacattatcttctttgagaaaaattaattgattataaaatatgtgctacttcacttacattattaaatatgtattaacgcctctcaccagggcttccagtgaagttacaatgccctagtctgtgaattagtctggaaacgtgtttttccttttcggatgttagagtaccctttgataaactaaattttactaagctgaacaactctgacagtctaaagagctaatgtgggttaccaaaaggcctgtacctgtaaaacaaaatgcaggtgtaatgattatacatgtctatggattacctggacatactctcatttgggttgttcttcaaagaagcaagcagccgatccctgttttcataaagctaatacttcagttggaaaaattaaacaggagcacaaagtcagggataggggttagcagaagagagaaatagtgtcacatcaagggcaggatctcatagctagggaacatttcacaaataaggtgagattttgtaaccaataataaaaatgaatgtttttataagtaaataacttatttttcatatggctaaagatggtaaaatgacttcattctatagccattgtaaataagaatttgctattgatgaaagaagttcagattggcatttgaagtattgagtgtatgggatctctaaggatttcttagattttatatttaaatattttttaaaccttagaggagtcaacaaactggctcttgattttcagcaccctactctcatgaaaaaagcctgaaaggaccctttcccttataagtaatttaatccaatttctccccattttatagatgaggaaactgaggctcagatcagatgagaactcacttaaatccactcaatgtgtagatggtagagctgggactagcaacattgctgcagcccattgttggcctctctcttcactttatcattgcccaagaatgaggatatgcagtaaacagaattcaggcaagatacctctaagctgttttgaaccctctgatattttgtatttatgtgtttgtctgtctccccctactagaatgtaagctccatggggcagggacttcactgtattttgttcatagtgtatccccagagcctggaccagtgcttggcacataggagatggcaataaatgcttgtagaattaataaacaaggtgaaggagagagctaatgaaatgaaaaaaaaaaaaaaaaaa

SEQ ID NO: 82 - DNA, 2722 bp, HOMO SAPIENS
gacaagctctcgcgagacgagccgtgcaggctgaaaaaatggcgccacccagtacccgggagcccagggtcctgtcggcgaccagcgcaaccaaatccgacggagagatggtgctgccaggcttcccggacgccgacagctttgtgaagtttgctcttgggtccgtggtggcagtcaccaaggcatctgggggcctaccacagtttggcgatgagtatgatttttaccgaagttttcctggcttccaagcattttgcgaaacacagggagacaggttgcttcagtgcatgagcagagtaatgcagtaccatgggtgtcgcagcaacattaaggatcgaagtaaagtgactgagctggaagacaagtttgatttactagttgatgccaatgatgtaattctggagagagtgggtattttactggatgaagcctcaggtgtaaacaagaatcaacagcctgtcctccctgccggcttgcaggtccccaaaacggtagtgtccagctggaaccgtaaggcagcagaatatggcaaaaaagcaaaatctgaaactttccggctgcttcatgcaaaaaatatcatccgacctcagctcaagtttcgagagaagattgacaattccaacacaccatttcttcctaaaatcttcatcaaacccaatgctcagaaacctctccctcaagctctctctaaggaaaggcgggaacgcccacaggatcgtcctgaggacttggacgtcccccctgcactggctgatttcatccatcagcagagaacccagcaggttgagcaagacatgtttgcacatccttatcaatatgaactaaatcactttaccccagcagatgcagtgcttcaaaagccacaaccccagttatacagacctatagaagagacaccatgccatttcatatcctccctggatgaactcgtggaactcaacgaaaagctcttgaattgtcaggaatttgcagttgacttggagcaccactcttacaggagcttcctgggactgacctgcctgatgcaaatttctactcggacggaagacttcatcattgacaccctcgagcttcgaagtgacatgtacattctcaatgagagcctcacagacccagccatcgttaaggtctttcatggtgctgattcagacatagaatggctacagaaagactttgggttgtatgtagtaaacatgtttgatactcatcaggcagcacgccttcttaacctgggcaggcactcactcgatcatctcctgaaactctactgcaacgtggactcaaacaagcaatatcagctggctgattggagaatacgccctctgcccgaggagatgctcagctacgcccgggatgacacccattacctgctatatatctatgacaaaatgaggctggagatgtgggagcgcggcaacgggcagcccgtgcagctgcaggtggtgtggcaacggagcagggacatctgcctcaagaaattcatcaaacctatcttcacggatgagtcctaccttgaactctataggaagcagaagaagcaccttaacacacagcagttgacagcctttcagctgctgtttgcctggagggataaaacagctcgcagggaagatgaaagttacggatatgtactgccaaaccacatgatgctgaaaatagctgaagaactgcctaaggaacctcagggcatcatagcttgctgcaacccagtaccgccccttgtgcggcagcagatcaacgaaatgcaccttttaatccagcaggcccgagagatgcccctgctcaagtctgaagttgcagccggagtgaagaagagcggaccgctgcccagtgctgagagattggagaatgttctctttggacctcacgactgctcccatgcccctccggatggctatccaatcatcccaaccagtggatctgtgccagttcagaagcaggcgagcctcttccctgatgaaaaagaagataacttgctgggtaccacatgcctgattgccacagctgtcatcacgttatttaatgaacctagtgctgaagacagtaaaaagggtccattgacagttgcacagaaaaaagcccagaacatcatggagtcctttgaaaatccatttaggatgatcagcaaccgttggaagctggcccaggtacaagtacaaaaagactctaaagaagctgtcaagaagaaggcagctgagcaaacagctgcccgggaacaggcaaaggaggcgtgcaaagctgcagcagaacaggccatctccgtccgacagcaggtcgtgctagaaaatgctgcaaagaagagagagcgagcaacaagcgacccaaggaccacagaacagaaacaagagaagaaacgactcaaaatttccaagaagccaaaggacccagagccaccagaaaaagagtttacgccttacgactacagccagtcagacttcaaggcttttgctggaaacagcaaatccaaagtttcttctcagtttgatccaaataaacagaccccgtctggcaagaaatgcattgcagccaaaaaaattaaacagtcggtgggaaacaaaagcatgtcctttccaactggaaagtcagacagaggcttcaggtacaactggccacagagatagtcctggaagacacgtggcgcctgtggaccggaagcaccaaatgctggtgctgcttttgtacatacatatttttaaaccattaaaattcttcctgaagaaag

SEQ ID NO: 83 - DNA, 4786 bp, HOMO SAPIENS
gctgcgtgacgcggcggcgcgcaagggacgtgcggagtgagtggcgctgcgggtggggccgtcggcggcgctggtgagagaacgccgagccgtcgccgcagcctccgccgccgagaagcccttgttcccgctgctgggaaggagagtctgtgccgacaagatggcggacggggagctgaacgtggacagcctcatcacccggctgctggaggtacgaggatgtcgtccaggaaagattgtgcagatgactgaagcagaagttcgaggcttatgtatcaagtctcgggagatctttctcagccagcctattcttttggaattggaagcaccgctgaaaatttgtggagatattcatggacaatatacagatttactgagattatttgaatatggaggtttcccaccagaagccaactatcttttcttaggagattatgtggacagaggaaagcagtctttggaaaccatttgtttgctattggcttataaaatcaaatatccagagaacttctttctcttaagaggaaaccatgagtgtgctagcatcaatcgcatttatggattctatgatgaatgcaaacgaagatttaatattaaattgtggaagaccttcactgattgttttaactgtctgcctatagcagccattgtggatgagaagatcttctgttgtcatggaggattgtcaccagacctgcaatctatggagcagattcggagaattatgagacctactgatgtccctgatacaggtttgctctgtgatttgctatggtctgatccagataaggatgtgcaaggctggggagaaaatgatcgtggtgtttcctttacttttggagctgatgtagtcagtaaatttctgaatcgtcatgatttagatttgatttgtcgagctcatcaggtggtggaagatggatatgaattttttgctaaacgacagttggtaaccttattttcagccccaaattactgtggcgagtttgataatgctggtggaatgatgagtgtggatgaaactttgatgtgttcatttcagatattgaaaccatctgaaaagaaagctaaataccagtatggtggactgaattctggacgtcctgtcactccacctcgaacagctaatccgccgaagaaaaggtgaagaaaggaattctgtaaagaaaccatcagatttgttaaggacatacttcataatatataagtgtgcactgtaaaaccatccagccatttgacaccctttatgatgtcacacctttaacttaaggagacgggtaaaggatcttaaatttttttctaatagaaagatgtgctacactgtattgtaataagtatactctgttatagtcaacaaagttaaatccaaattcaaaattatccattaaagttacatcttcatgtatcacaatttttaaagttgaaaagcatcccagttaaactagatgtgatagttaaaccagatgaaagcatgatgatccatctgtgtaatgtggttttagtgttgcttggttgtttaattattttgagcttgttttgtttttgtttgttttcactagaataatggcaaatacttctaatttttttccctaaacatttttaaaagtgaaatatgggaagagctttacagacattcaccaactattattttcccttgtttatctacttagatatctgtttaatcttactaagaaaactttcgcctcattacattaaaaaggaattttagagattgattgttttaaaaaaaaatacgcacattgtccaatccagtgattttaatcatacagtttgactgggcaaactttacagctgatagtgaatattttgctttatacaggaattgacactgatttggatttgtgcactctaatttttaacttattgatgctctattgtgcagtagcatttcatttaagataaggctcatatagtattacccaactagttggtaatgtgattatgtggtaccttggctttaggttttcattcgcacggaacaccttttggcatgcttaacttcctggtaacaccttcacctgcattggttttctttttcttttttctttctttttttttttttttttttttttgagttgttgtttgtttttagatccacagtacatgagaatccttttttgacaagccttggaaagctgacactgtctctttttcctccctctatacgaaggatgtatttaaatgaatgctggtcagtgggacattttgtcaactatgggtattgggtgcttaactgtctaatattgccatgtgaatgttgtatacgattgtaaggcttatgtcactaaagatttttattctgattttttcataatcaaaggtcatatgatactgtatagacaagctttgtagtgaagtatagtagcaataatttctgtacctgatcaagtttattgcagcctttcttttcctatttcttttttttaagggttagtattaacaaatggcaatgagtagaaaagttaacatgaagattttagaaggagagaacttacaggacacagatttgtgattctttgactgtgacactattggatgtgattctaaaagcttttattgagcattgtcaaatttgtaagcttcatagggatggacatcatatctataatgcccttctatatgtgctaccatagatgtgacatttttgaccttaatatcgtctttgaaaatgttaaattgagaaacctgttaacttacattttatgaattggcacattgtattacttactgcaagagatatttcattttcagcacagtgcaaaagttctttaaaatgcatatgtctttttttctaattccgttttgttttaaagcacattttaaatgtagttttctcatttagtaaaagttgtctaattgatatgaagcctgactgattttttttttccttacagtgagacatttaagcacacattttattcacatagatactatgtccttgacatattgaaatgattcttttctgaaagtattcatgatctgcatatgatgtattaggttaggtcacaaaggttttatctgaggtgatttaaataacttcctgattggagtgtgtaagctgagcgatttctaataaaattttagttgtacacttttagtagtcatagtgaagcaggtctagaaaataagcctttggcagggaaaaagggcaatgttgattaatctcagtattaaaccacattaatctgtatcccattgtctggcttttgtaaattcatccaggtcaagactaagtatgttggttaataggaatccttttttttttttttaaagactaaatgtgaaaaaataatcactacttaagctaattaatattggtcattaaatttaaaggatggaaatttatcatgtttaaaaattattcaagcactcttaaaaccacttaaacagcctccagtcataaaaatgtgttctttacaaatatttgcttggcaacacgacttgaaataaataaaactttgtttcttaggagaaaatgattctgtaattccagtgtcactaatttatattgttctttcctctgatttttttcaggttagtgatttttttgtatacaatttaatccaaatgttatgacattcagaaatcatgaaacacagtagatatctgttataatgtggtgtatcacatggattataaagcaaagttatggtcgatttctattcttgaaagaatcaactacagtgaatcctttgcatttgaagccttaacatgcattgctttaattttgcccagggacaaattttaataatcagcaagactggtttgtgcaaagcgttgagtcatcaggtatttagagcctagccagctacccagtatccatgctgccatatcccttcattgtaaaaagtacctaaacattcgtgaaatgattttttttagctgaaaaatgctggcaagaagaattttaaagcttaaaataggtggtaaatttgaagtatgagtgtgttcacgagaaacataggcttttcaaaaaaatttttattcaaggcaaagcaaggaacatcttgagatatgtctcaagaatataaagatgtattattttaagccaaggagctgaaatatatctcagtttataaattcaggtatattctttttgtctccatggcaaccataacttttgaaccaaaaaaaattgtttttacatctttatgctgaaaatgtgtttagattaggaatatggtcgggctgaatttgctgttgctccctaaccaaatccacctcttgttttccttgtgagtccatggctaaatcaaagctgcccctgagaagagacttaatccaagcctgattgtactagtggcatcacttagaagtaggctttccctcttcctagtagatctcaatgttttataattccttaaaacagctgaaaattgggacaacatactttacgcaatgaacagtagttaaataggaaataaactagttccatataagtatacacctagagttttaattacctttataatgtttcttaaaagtgaaacttagatacaattgtgattggatacttagatactaagtgaaacttagtgtaacaattttgatctgttaaattggattttacatgtacatttgaatgccagaatttctaaataaatcccctggttaggaaattttaaaagtcaaagcttgttttcttcaaccactaccttctacattggttgacttagaccgtaagctttttaagtttctcattgtaatttaccttctcatgcagattgctgatgttttattaaaccttatttttacaaaaatgaaaaaa

SEQ ID NO: 84 - DNA, 3407 bp, HOMO SAPIENS
gcttcccggctctgccctcttggccgaagtgcccgctgccgggcgcgggcctcagacaatacaatggtgggtgaagagaagatgtctctaagaaaccggctgtcaaagtccagggaaaatcctgaggaagatgaagaccagagaaaccctgcaaaggagtccctagagacacctagtaatggtcgaattgacataaaacagttgatagcaaagaagataaagttgacagcagaggcagaggaattgaagccattttttatgaaggaagttggcagtcactttgatgattttgtgaccaatctcattgaaaagtcagcatcattagataatggtgggtgcgctctcacaaccttttctgttcttgaaggagagaaaaacaaccatagagcgaaggatttgagagcacctccagaacaaggaaagatttttattgcaaggcgctctctcttagatgaactgcttgaagtggaccacatcagaacaatatatcacatgtttattgccctcctcattctctttatcctcagcacacttgtagtagattacattgatgaaggaaggctggtgcttgagttcagcctcctgtcttatgcttttggcaaatttcctaccgttgtttggacctggtggatcatgttcctgtctacattttcagttccctattttctgtttcaacattgggccactggctatagcaagagttctcatccgctgatccgttctctcttccatggctttcttttcatgatcttccagattggagttctaggttttggaccaacatatgttgtgttagcatatacactgccaccagcttcccggttcatcattatattcgagcagattcgttttgtaatgaaggcccactcatttgtcagagagaacgtgcctcgggtactaaattcagctaaggagaaatcaagcactgttccaatacctacagtcaaccagtatttgtacttcttatttgctcctacccttatctaccgtgacagctatcccaggaatcccactgtaagatggggttatgtcgctatgaagtttgcacaggtctttggttgctttttctatgtgtactacatctttgaaaggctttgtgcccccttgtttcggaatatcaaacaggagcccttcagcgctcgtgttctggtcctatgtgtatttaactccatcttgccaggtgtgctgattctcttccttactttttttgcctttttgcactgctggctcaatgcctttgctgagatgttacgctttggtgacaggatgttctataaggattggtggaactccacgtcatactccaactattatagaacctggaatgtggtggtccatgactggctatattactatgcttacaaggactttctctggtttttctccaagagattcaaatctgctgccatgttagctgtctttgctgtatctgctgtagtacacgaatatgccttggctgtttgcttgagctttttctatcccgtgctcttcgtgctcttcatgttctttggaatggctttcaacttcattgtcaatgatagtcggaaaaagccgatttggaatgttctgatgtggacttctcttttcttgggcaatggagtcttactctgcttttattctcaagaatggtatgcacgtcagcactgtcctctgaaaaatcccacatttttggattatgtccggccacgttcctggacttgtcgttacgtgttttagaagcttggactttgtttcctccttgtcactgaagattgggtagctccctgatttggagccagctgtttccagttgttactgaagttatctgtgttatttggaccactccaggctttacagatgactcactccattcctaggtcacttgaagccaaactgttggaagttcactggagtcttgtacacttaagcagagcagaagtttttttgtggggctgggtggggggagaagaccgactaacagctgaagtaatgacagattgttgctgggtcatatcagctttatcccttggtaattatatctgttttgtttcttgactctgtccaatcagagaataaacatcatagtttcttggccactgaattagccaaaacacttaggaagaaatcacttaaatacctctggcttagaaattttttcatgcacactgttggaatgtatgctaattgaacatgcaattggggaagaaaaaatgtagaatgatttttgctatttctagtagaaagaaaatgtctgttttccaaagataatgttatacatcctattttgtaatttttttgaaaaaagttcaatgttcagttttccttagtttttaccttgttttctctataggtcatgatttctgtgaagcaaaaagatgccttttaccatgaattcttgagtttacatcaataatattgtatattaaggggatcagaagtaggaaggaaaaaataagagatagcagaggaaaaagaaaaacatttcctcttataacttctgaagtaatttgtaaaaaagatttgtagagtcaatcatgtgtttaaattattttatcacaaacttaacatggaagatattcctttttaactttgtggtaacttctttgaagttatttagaaatatcctttggaacaattattttattgtctaataaatattgacttctcttgaattattttgcagactagtgagtctgtaacataagtattaatcacctccactcatattaaagtgatcattaagaatccagaagctggcttctgcatttgctcagttatacttttaatggtagtatgtttttaggtggaataaattaatatgtgattggtttcaaggaaatgtactctattatgtaatacttccattttataagatgcccgtttctaatacaatgtgtgtaggaattatttgtatgtatgaggtatgattgtaaagattgagcattggaaggggtatcagagaccatgtagttcaactttccactcaaagtaagatttatgaattatttaaatgatagttgttacttggaacagccacttgagaggctctcttggtattgtttggaattgttttaaagtcagtttgagtctcacaagaaggtaagtagagtttcttaatagtcacaacttaatttgaaccacaagtatccagcttaatcacgtatcttactcacgataccactggtccagatgagtttaggtaattttcaaacattaaatccaacttcaacggaaacaaatacactcaagggaagttatttttaaaaaggtactctgcatgttcccgcagtaatgttctgcacaacagtattgtaattgtaatggaatcataacctgctaactagtttgctttaatatggcttgtaattcttgacatttttcttaaaattaaaacgaatttttattttgaatttaaaaaaaaaaaaaaa

SEQ ID NO: 85 - DNA, 4039 bp, HOMO SAPIENS
ctggacctgggcaccgccagccgcctgggcacgggactgggcgggggcgctgacctcggcctaggaggcccaggatcccggagacgcccgcgccctcaggaccctgcgggtcgcacgccctccccagcttctgctgctcgccgctcttcggcagggcgaggtcaggtgcccccttctcgcctctcttctcttctcttcctcctccacttctgtgcccgcggagactccggccgcccccttccgcaggggtgtagtaatctgcggagctgacagcagccccgcagccaccctgcccgaagtctccggaagcggcacgagctcaggccgccgcagccccggcgaacccactgttggacctgaggagccagccctcctcccgcacccaaacttggagcacttgacctttggctgttggagggggcaggctcgcgggtggctggacagctgcggagccgcgagggcatcttgcctggagaccgtcggctgcactcccgggctcctggctttgcctctgggatcccgaggtgtccacatcagacgcatgttgactgagacctagagtcatggatgtatgcgtccgtcttgccctgtggctcctctggggactcctcctgcaccagggccagagcctcagccatagtcacagtgagaaggcgacaggaaccagctcgggggccaactctgaggagtccactgcagcagagttttgccgaattgacaagcccctgtgtcacagtgaggatgagaaactcagcttcgaggcagtccgtaacatccacaaactgatggacgatgatgccaatggtgatgtggatgtggaagaaagtgatgagttcctgagggaagacctcaattaccatgacccaacagtgaaacacagcaccttccatggtgaggataagctcatcagcgtggaggacctgtggaaggcatggaagtcatcagaagtatacaattggaccgtggatgaggtggtacagtggctgatcacatatgtggagctgcctcagtatgaggagaccttccggaagctgcagctcagtggccatgccatgccaaggctggctgtcaccaacaccaccatgacagggactgtgctgaagatgacagaccggagtcatcggcagaagctgcagctgaaggctctggatacagtgctctttgggcctcctctcttgactcgccataatcacctcaaggacttcatgctggtggtgtctatcgttattggtgtgggcggctgctggtttgcctatatccagaaccgttactccaaggagcacatgaagaagatgatgaaggacttggaggggttacaccgagctgagcagagtctgcatgaccttcaggaaaggctgcacaaggcccaggaggagcaccgcacagtggaggtggagaaggtccatctggaaaagaagctgcgcgatgagatcaaccttgctaagcaggaagcccagcggctgaaggagctgcgggagggtactgagaatgagcggagccgccaaaaatatgctgaggaggagttggagcaggttcgggaggccttgaggaaagcagagaaggagctagaatctcacagctcatggtatgctccagaggcccttcagaagtggctgcagctgacacatgaggtggaggtgcaatattacaacatcaagaagcaaaatgctgagaagcagctgctggtggccaaggagggggctgagaagataaaaaagaagagaaacacactctttggcaccttccacgtggcccacagctcttccctggatgatgtagatcataaaattctaacagctaagcaagcactgagcgaggtgacagcagcattgcgggagcgcctgcaccgctggcaacagatcgagatcctctgtggcttccagattgtcaacaaccctggcatccactcactggtggctgccctcaacatagaccccagctggatgggcagtacacgccccaaccctgctcacttcatcatgactgacgacgtggatgacatggatgaggagattgtgtctcccttgtccatgcagtcccctagcctgcagagcagtgttcggcagcgcctgacggagccacagcatggcctgggatctcagagggatttgacccattccgattcggagtcctccctccacatgagtgaccgccagcgtgtggcccccaaacctcctcagatgagccgtgctgcagacgaggctctcaatgccatgacttccaatggcagccaccggctgatcgagggggtccacccagggtctctggtggagaaactgcctgacagccctgccctggccaagaaggcattactggcgctgaaccatgggctggacaaggcccacagcctgatggagctgagcccctcagccccacctggtggctctccacatttggattcttcccgttctcacagccccagctccccagacccagacacaccatctccagttggggacagccgagccctgcaagccagccgaaacacacgcattccccacctggctggcaagaaggctgtggctgaggaggataatggctctattggcgaggaaacagactccagcccaggccggaagaagtttcctctcaaaatctttaagaagcctcttaagaagtaggcaggatggggtggcagtaaagggacagcttgtccttccctgggtgttctgtctctccttccctcccttccttcaagataactggccccaagagtggggcatgggaagggctggtccaggggtctgggcactgtacatacctgccccctcatccttgggtccttcattattatttattaactgaccaccatggcctgcctgccctgcctccgtcccaaccatgggctgctgctgtcactccctctccacttcagtgcatgtcttagttgctgttccctcagctcccagctccacctctggggttcagcttctgtctctgctgtcccagttttgaggtttggtttcttgtttctgtctcttgctttcaggctcctccctcccaccactccccaacttcccctagcagttgcagggaagataggacgagtagcttctgacatgtgtgcctcagatctgttccaccccactcacagtggttctgtttgctccagactggggctagggcctaatctttgaagtttgttctttggtattgatgtgggtcagaaggagcctcatcctaatctcactcaggcctccagggatccatgggggagtgaaaccaattctcagagaacaacccaccagagacttttaaagagaggccaggcttgggaatgggttgggagaggcatctgttcattggagcatgagtggatgccagaactgtaggttataaggcagtcactttttctctctactcccacccacacctgcctccctcttacccctgctcccccacactgcaggaggatttgtctctaagaggtgctgccccaaagctccccaagcatcaatactcctagggctcaggacaagtggctcccctggccaggagagccacagccatgatacagggctcttatggagccctggagttgttgggcaaggatgctgtcattttttgaaccaaaagacaaacaggttaaaaggaaaaaaagtaatctgaatttcccaagtgcctacgctgcatattccccttgttagatcccattttcatgttactttgtagccttggccagaggctcaaaaaggacacaaccagtttggggaaggggtggctaaggaagatggtataggtgaaggcggctgtgtgaccactttcccccacccttcccaccctctagacaactctctcccttacctgtttttgctatggctgtaaaggtatttttcctctgccccactccctgccatacctttatcctgggatcctattttgggcctggggtgggtatacctggggctggtcttaggagggtgctaggctgcagactgccttgtactccctggacaccctcaaatggggttttctgtgttatttcataaaattctttgaagtccaataaagcatgtaggagattttaaccacaaaaaaa

SEQ ID NO: 86 - DNA, 2611 bp, HOMO SAPIENS
aactgagtggctgtgaaagggtggggtttgctcagactgtccttcctctctggactgtaagaatatgtctccagggccagtgtctgctgcgatcgagtcccaccttccaagtcctggcatctcaatgcatctgggaagctacctgcattaagtcaggactgagcacacaggtgaactccagaaagaagaagctatggccgcagtgattctggagagcatctttctgaagcgatcccaacagaaaaagaaaacatcacctctaaacttcaagaagcgcctgtttctcttgaccgtgcacaaactctcctactatgagtatgactttgaacgtgggagaagaggcagtaagaagggttcaatagatgttgagaagatcacttgtgttgaaacagtggttcctgaaaaaaatcctcctccagaaagacagattccgagaagaggtgaagagtccagtgaaatggagcaaatttcaatcattgaaaggttcccttatcccttccaggttgtatatgatgaagggcctctctacgtcttctccccaactgaagaactaaggaagcggtggattcaccagctcaaaaacgtaatccggtacaacagtgatctggttcagaaatatcacccttgcttctggatcgatgggcagtatctctgctgctctcagacagccaaaaatgctatgggctgccaaattttggagaacaggaatggaagcttaaaacctgggagttctcaccggaagacaaaaaagcctcttcccccaacgcctgaggaggaccagatcttgaaaaagccactaccgcctgagccagcagcagcaccagtctccacaagtgagctgaaaaaggttgtggccctttatgattacatgccaatgaatgcaaatgatctacagctgcggaagggtgatgaatattttatcttggaggaaagcaacttaccatggtggagagcacgagataaaaatgggcaggaaggctacattcctagtaactatgtcactgaagcagaagactccatagaaatgtatgagtggtattccaaacacatgactcggagtcaggctgagcaactgctaaagcaagaggggaaagaaggaggtttcattgtcagagactccagcaaagctggcaaatatacagtgtctgtgtttgctaaatccacaggggaccctcaaggggtgatacgtcattatgttgtgtgttccacacctcagagccagtattacctggctgagaagcaccttttcagcaccatccctgagctcattaactaccatcagcacaactctgcaggactcatatccaggctcaaatatccagtgtctcaacaaaacaagaatgcaccttccactgcaggcctgggatacggatcatgggaaattgatccaaaggacctgaccttcttgaaggagctggggactggacaatttggggtagtgaagtatgggaaatggagaggccagtacgacgtggccatcaagatgatcaaagaaggctccatgtctgaagatgaattcattgaagaagccaaagtcatgatgaatctttcccatgagaagctggtgcagttgtatggcgtctgcaccaagcagcgccccatcttcatcatcactgagtacatggccaatggctgcctcctgaactacctgagggagatgcgccaccgcttccagactcagcagctgctagagatgtgcaaggatgtctgtgaagccatggaatacctggagtcaaagcagttccttcaccgagacctggcagctcgaaactgtttggtaaacgatcaaggagttgttaaagtatctgatttcggcctgtccaggtatgtcctggatgatgaatacacaagctcagtaggctccaaatttccagtccggtggtccccaccggaagtcctgatgtatagcaagttcagcagcaaatctgacatttgggcttttggggttttgatgtgggaaatttactccctggggaagatgccatatgagagatttactaacagtgagactgctgaacacattgcccaaggcctacgtctctacaggcctcatctggcttcagagaaggtatataccatcatgtacagttgctggcatgagaaagcagatgagcgtcccactttcaaaattcttctgagcaatattctagatgtcatggatgaagaatcctgagctcgccaataagcttcttggttctacttctcttctccacaagccccaatttcactttctcagaggaaatcccaagcttaggagccctggagcctttgtgctcccactcaatacaaaaaggcccctctctacatctgggaatgcacctcttctttgattccctgggatagtggcttctgagcaaaggccaagaaattattgtgcctgaaatttcccgagagaattaagacagactgaatttgcgatgaaaatattttttaggagggaggatgtaaatagccgcacaaaggggtccaacagctctttgagtaggcatttggtagagcttgggggtgtgtgtgtgggggtggaccgaatttggcaagaatgaaatggtgtcataaagatgggaggggagggtgttttgataaaataaaattactagaaagcttgaaagtc

SEQ ID NO: 87 - DNA, 9179 bp, HOMO SAPIENS
gcaagaactgcaggggaggaggacgctgccacccacagcctctagagctcattgcagctgggacagcccggagtgtggttagcagctcggcaagcgctgcccaggtcctggggtggtggcagccagcgggagcaggaaaggaagcatgttcccaggctgcccacgcctctgggtcctggtggtcttgggcaccagctgggtaggctgggggagccaagggacagaagcggcacagctaaggcagttctacgtggctgctcagggcatcagttggagctaccgacctgagcccacaaactcaagtttgaatctttctgtaacttcctttaagaaaattgtctacagagagtatgaaccatattttaagaaagaaaaaccacaatctaccatttcaggacttcttgggcctactttatatgctgaagtcggagacatcataaaagttcactttaaaaataaggcagataagcccttgagcatccatcctcaaggaattaggtacagtaaattatcagaaggtgcttcttaccttgaccacacattccctgcggagaagatggacgacgctgtggctccaggccgagaatacacctatgaatggagtatcagtgaggacagtggacccacccatgatgaccctccatgcctcacacacatctattactcccatgaaaatctgatcgaggatttcaactcggggctgattgggcccctgcttatctgtaaaaaagggaccctaactgagggtgggacacagaagacgtttgacaagcaaatcgtgctactatttgctgtgtttgatgaaagcaagagctggagccagtcatcatccctaatgtacacagtcaatggatatgtgaatgggacaatgccagatataacagtttgtgcccatgaccacatcagctggcatctgctgggaatgagctcggggccagaattattctccattcatttcaacggccaggtcctggagcagaaccatcataaggtctcagccatcacccttgtcagtgctacatccactaccgcaaatatgactgtgggcccagagggaaagtggatcatatcttctctcaccccaaaacatttgcaagctgggatgcaggcttacattgacattaaaaactgcccaaagaaaaccaggaatcttaagaaaataactcgtgagcagaggcggcacatgaagaggtgggaatacttcattgctgcagaggaagtcatttgggactatgcacctgtaataccagcgaatatggacaaaaaatacaggtctcagcatttggataatttctcaaaccaaattggaaaacattataagaaagttatgtacacacagtacgaagatgagtccttcaccaaacatacagtgaatcccaatatgaaagaagatgggattttgggtcctattatcagagcccaggtcagagacacactcaaaatcgtgttcaaaaatatggccagccgcccctatagcatttaccctcatggagtgaccttctcgccttatgaagatgaagtcaactcttctttcacctcaggcaggaacaacaccatgatcagagcagttcaaccaggggaaacctatacttataagtggaacatcttagagtttgatgaacccacagaaaatgatgcccagtgcttaacaagaccatactacagtgacgtggacatcatgagagacatcgcctctgggctaataggactacttctaatctgtaagagcagatccctggacaggcgaggaatacagagggcagcagacatcgaacagcaggctgtgtttgctgtgtttgatgagaacaaaagctggtaccttgaggacaacatcaacaagttttgtgaaaatcctgatgaggtgaaacgtgatgaccccaagttttatgaatcaaacatcatgagcactatcaatggctatgtgcctgagagcataactactcttggattctgctttgatgacactgtccagtggcacttctgtagtgtggggacccagaatgaaattttgaccatccacttcactgggcactcattcatctatggaaagaggcatgaggacaccttgaccctcttccccatgcgtggagaatctgtgacggtcacaatggataatgttggaacttggatgttaacttccatgaattctagtccaagaagcaaaaagctgaggctgaaattcagggatgttaaatgtatcccagatgatgatgaagactcatatgagatttttgaacctccagaatctacagtcatggctacacggaaaatgcatgatcgtttagaacctgaagatgaagagagtgatgctgactatgattaccagaacagactggctgcagcattaggaatcaggtcattccgaaactcatcattgaatcaggaagaagaagagttcaatcttactgccctagctctggagaatggcactgaattcgtttcttcaaacacagatataattgttggttcaaattattcttccccaagtaatattagtaagttcactgtcaataaccttgcagaacctcagaaagccccttctcaccaacaagccaccacagctggttccccactgagacacctcattggcaagaactcagttctcaattcttccacagcagagcattccagcccatattctgaagaccctatagaggatcctctacagccagatgtcacagggatacgtctactttcacttggtgctggagaattcaaaagtcaagaacatgctaagcataagggacccaaggtagaaagagatcaagcagcaaagcacaggttctcctggatgaaattactagcacataaagttgggagacacctaagccaagacactggttctccttccggaatgaggccctgggaggaccttcctagccaagacactggttctccttccagaatgaggccctggaaggaccctcctagtgatctgttactcttaaaacaaagtaactcatctaagattttggttgggagatggcatttggcttctgagaaaggtagctatgaaataatccaagatactgatgaagacacagctgttaacaattggctgatcagcccccagaatgcctcacgtgcttggggagaaagcacccctcttgccaacaagcctggaaagcagagtggccacccaaagtttcctagagttagacataaatctctacaagtaagacaggatggaggaaagagtagactgaagaaaagccagtttctcattaagacacgaaaaaagaaaaaagagaagcacacacaccatgctcctttatctccgaggacctttcaccctctaagaagtgaagcctacaacacattttcagaaagaagacttaagcattcgttggtgcttcataaatccaatgaaacatctcttcccacagacctcaatcagacattgccctctatggattttggctggatagcctcacttcctgaccataatcagaattcctcaaatgacactggtcaggcaagctgtcctccaggtctttatcagacagtgcccccagaggaacactatcaaacattccccattcaagaccctgatcaaatgcactctacttcagaccccagtcacagatcctcttctccagagctcagtgaaatgcttgagtatgaccgaagtcacaagtccttccccacagatataagtcaaatgtccccttcctcagaacatgaagtctggcagacagtcatctctccagacctcagccaggtgaccctctctccagaactcagccagacaaacctctctccagacctcagccacacgactctctctccagaactcattcagagaaacctttccccagccctcggtcagatgcccatttctccagacctcagccatacaaccctttctccagacctcagccatacaaccctttctttagacctcagccagacaaacctctctccagaactcagtcagacaaacctttctccagccctcggtcagatgcccctttctccagacctcagccatacaaccctttctctagacttcagccagacaaacctctctccagaactcagccatatgactctctctccagaactcagtcagacaaacctttccccagccctcggtcagatgcccatttctccagacctcagccatacaaccctttctctagacttcagccagacaaacctctctccagaactcagtcaaacaaacctttccccagccctcggtcagatgcccctttctccagaccccagccatacaaccctttctctagacctcagccagacaaacctctctccagaactcagtcagacaaacctttccccagacctcagtgagatgcccctctttgcagatctcagtcaaattccccttaccccagacctcgaccagatgacactttctccagaccttggtgagacagatctttccccaaactttggtcagatgtccctttccccagacctcagccaggtgactctctctccagacatcagtgacaccacccttctcccggatctcagccagatatcacctcctccagaccttgatcagatattctacccttctgaatctagtcagtcattgcttcttcaagaatttaatgagtcttttccttatccagaccttggtcagatgccatctccttcatctcctactctcaatgatacttttctatcaaaggaatttaatccactggttatagtgggcctcagtaaagatggtacagattacattgagatcattccaaaggaagaggtccagagcagtgaagatgactatgctgaaattgattatgtgccctatgatgacccctacaaaactgatgttaggacaaacatcaactcctccagagatcctgacaacattgcagcatggtacctccgcagcaacaatggaaacagaagaaattattacattgctgctgaagaaatatcctgggattattcagaatttgtacaaagggaaacagatattgaagactctgatgatattccagaagataccacatataagaaagtagtttttcgaaagtacctcgacagcacttttaccaaacgtgatcctcgaggggagtatgaagagcatctcggaattcttggtcctattatcagagctgaagtggatgatgttatccaagttcgttttaaaaatttagcatccagaccgtattctctacatgcccatggactttcctatgaaaaatcatcagagggaaagacttatgaagatgactctcctgaatggtttaaggaagataatgctgttcagccaaatagcagttatacctacgtatggcatgccactgagcgatcagggccagaaagtcctggctctgcctgtcgggcttgggcctactactcagctgtgaacccagaaaaagatattcactcaggcttgataggtcccctcctaatctgccaaaaaggaatactacataaggacagcaacatgcctatggacatgagagaatttgtcttactatttatgacctttgatgaaaagaagagctggtactatgaaaagaagtcccgaagttcttggagactcacatcctcagaaatgaaaaaatcccatgagtttcacgccattaatgggatgatctacagcttgcctggcctgaaaatgtatgagcaagagtgggtgaggttacacctgctgaacataggcggctcccaagacattcacgtggttcactttcacggccagaccttgctggaaaatggcaataaacagcaccagttaggggtctggccccttctgcctggttcatttaaaactcttgaaatgaaggcatcaaaacctggctggtggctcctaaacacagaggttggagaaaaccagagagcagggatgcaaacgccatttcttatcatggacagagactgtaggatgccaatgggactaagcactggtatcatatctgattcacagatcaaggcttcagagtttctgggttactgggagcccagattagcaagattaaacaatggtggatcttataatgcttggagtgtagaaaaacttgcagcagaatttgcctctaaaccttggatccaggtggacatgcaaaaggaagtcataatcacagggatccagacccaaggtgccaaacactacctgaagtcctgctataccacagagttctatgtagcttacagttccaaccagatcaactggcagatcttcaaagggaacagcacaaggaatgtgatgtattttaatggcaattcagatgcctctacaataaaagagaatcagtttgacccacctattgtggctagatatattaggatctctccaactcgagcctataacagacctacccttcgattggaactgcaaggttgtgaggtaaatggatgttccacacccctgggtatggaaaatggaaagatagaaaacaagcaaatcacagcttcttcgtttaagaaatcttggtggggagattactgggaacccttccgtgcccgtctgaatgcccagggacgtgtgaatgcctggcaagccaaggcaaacaacaataagcagtggctagaaattgatctactcaagatcaagaagataacggcaattataacacagggctgcaagtctctgtcctctgaaatgtatgtaaagagctataccatccactacagtgagcagggagtggaatggaaaccatacaggctgaaatcctccatggtggacaagatttttgaaggaaatactaataccaaaggacatgtgaagaactttttcaaccccccaatcatttccaggtttatccgtgtcattcctaaaacatggaatcaaagtattgcacttcgcctggaactctttggctgtgatatttactagaattgaacattcaaaaacccctggaagagactctttaagacctcaaaccatttagaatgggcaatgtattttacgctgtgttaaatgttaacagttttccactatttctctttcttttctattagtgaataaaattttatacaagaagcttttataatgtaactccttgctaccagtaagtaagataatggctattacttctgcattaatttgaatacaggtaggaaaatatcaagaaccaacaagaaaagggcttatctttcttaatgattgaaaatgctatgaagtaatatttatgtagttaaaatgcttcattataactcttttaaatcctttacacactagtaaaacagatattactttaaataataattgatagacctggataactttcacaaacacatgattttttaatggtttttcttgagtgaagagaaaaacaatattatcaaatgaaataagtacttaaaatatcctgtctttcccatataacaatgatttttctgactttccatgagtaaaaaaacagccaagcatctttccagtagccccattgaaattgtgaatccgtcctggtctccctaaggactgcacacattgatattcaaggttggtggtcattagatatggaacagaactgaaataaccatggtagaactgaatgtgtaatgttggctttattctagctggtactacatggcacacagtttcaaaacataatttcacctactggaaagctcagacctgtaaaacagagcatgggaactgctggtctaaatgcagttgttcctgctcaaagagacctctggccaaactggcaagcagttaaagttttctttcagggccttcctctctatggcctcaacttcctcctctctcttcttccagcaacttcccctttcatcattcctttccctggggacttggcattcagtgatcctgtagatattgcacaactggggaacctttagacatccttaaaatcacatgagatagacagtcatttggggtgtctgaaataaaccaccccaaaacttagtgttaaaagagcaaccaaaaaaaatttatgtgagattatggatttgttacttagcttgatttaatcatcctgtaacgtgtacatatatcaaaatgttatgtataccataaatatataaaattttatcaacgaaattcataacaatctctcagaccacagagaaatcaaattagaactgaggactaagaaactcactcgaaaccacacaactacatggaaactgaacaacctgctcctgaatgactactgggtaaataatgaaattaaggcagaaataaataagttccttaaaaccaatgagaacaaagagacaacataccagaatctctaggagacagggctttgcttttgctgcattctattcgttgtgaacacaaattacaggccagtctcgattcagtgtagaagggaactgcataaggaccacataccaggaggcataattcactgggagcatctttagaaactaccagagttacctgttgcccataccagtggggtaagccctatgaatgtatatgagagtttcaaacatccacaaaacattggctttctaatattcgtattcccactattcctttcttttcatgattcatgtcattgtcccatcaacatttctaagatttccattccgttaagagcaaaagagaatgttggaaggtgggggaaaacatttctttgttttctacagggccagcttcttggatgtgtgtgatctgttcagttgcaaagggtcacatgctcagaaggaccgcatgctaaatttaatgctttgcagttaccctcttgaaatcctttattttttaagaaggaattcgacatttccatttttcaatgagccccacaaattacgcagctagtcctgggcttctctactctgaaattgggcaggatctctcttgatctagaatttactaaggcataataggggcaagaaaatcttatgaaataatggggggtagggaagagatgggaatggagcatgagatccagcttcgttattctctacttgagaaaaataaggccccaaagattaaacaacttgcccaaggatattgcttgttagtgtcagaactgaaaccagaaaccaaatgatcatatccctagacttttagtctgctttctcttccataaaatgaaacttataatgtttctaatccattgctcagacaggtagacatgaatattaattgataatgactattaattgatctggaaaatacttgtttggggatcaataatatgtttgggctattatctaatgctgtgtagaaatattaaaacccctgttattttgaaataaaaaagatacccactttt

SEQ ID NO: 88 - DNA, 4491 bp, HOMO SAPIENS
acagatcaggagaacctcagtctgacgacattgaagctagccgaatgaagcgagcagctgcaaagcatctaatagaacgctactaccaccagttaactgagggctgtggaaatgaagcctgcacgaatgagttttgtgcttcctgtccaacttttcttcgtatggataataatgcagcagctattaaagccctcgagctttataagattaatgcaaaactctgtgatcctcatccctccaagaaaggagcaagctcagcttaccttgagaactcgaaaggtgcccccaacaactcctgctctgagataaaaatgaacaagaaaggcgctagaattgattttaaagatgtgacttacttaacagaagagaaggtatatgaaattcttgaattatgtagagaaagagaggattattcccctttaatccgtgttattggaagagttttttctagtgctgaggcattggtacagagcttccggaaagttaaacaacacaccaaggaagaactgaaatctcttcaagcaaaagatgaagacaaagatgaagatgaaaaggaaaaagctgcatgttctgctgctgctatggaagaagactcagaagcatcttcctcaaggataggtgatagctcacagggagacaacaatttgcaaaaattaggccctgatgatgtgtctgtggatattgatgccattagaagggtctacaccagattgctctctaatgaaaaaattgaaactgcctttctcaatgcacttgtatatttgtcacctaacgtggaatgtgacttgacgtatcacaatgtatactctcgagatcctaattatctgaatttgttcattatcgtaatggagaatagaaatctccacagtcctgaatatctggaaatggctttgccattattttgcaaagcgatgagcaagctaccccttgcagcccaaggaaaactgatcagactgtggtctaaatacaatgcagaccagattcggagaatgatggagacatttcagcaacttattacttataaagtcataagcaatgaatttaacagtcgaaatctagtgaatgatgatgatgccattgttgctgcttcgaagtgcttgaaaatggtttactatgcaaatgtagtgggaggggaagtggacacaaatcacaatgaagaagatgatgaagagcccatccctgagtccagcgagctgacacttcaggaacttttgggagaagaaagaagaaacaagaaaggtcctcgagtggaccccctggaaactgaacttggtgttaaaaccctggattgtcgaaaaccacttatcccttttgaagagtttattaatgaaccactgaatgaggttctagaaatggataaagattatacttttttcaaagtagaaacagagaacaaattctcttttatgacatgtccctttatattgaatgctgtcacaaagaatttgggattatattatgacaatagaattcgcatgtacagtgaacgaagaatcactgttctctacagcttagttcaaggacagcagttgaatccatatttgagactcaaagttagacgtgaccatatcatagatgatgcacttgtccggctagagatgatcgctatggaaaatcctgcagacttgaagaagcagttgtatgtggaatttgaaggagaacaaggagttgatgagggaggtgtttccaaagaattttttcagctggttgtggaggaaatcttcaatccagatattggtatgttcacatacgatgaatctacaaaattgttttggtttaatccatcttcttttgaaactgagggtcagtttactctgattggcatagtactgggtctggctatttacaataactgtatactggatgtacattttcccatggttgtctacaggaagctaatggggaaaaaaggaacttttcgtgacttgggagactctcacccagttctatatcagagtttaaaagatttattggagtatgaagggaatgtggaagatgacatgatgatcactttccagatatcacagacagatctttttggtaacccaatgatgtatgatctaaaggaaaatggtgataaaattccaattacaaatgaaaacaggaaggaatttgtcaatctttattctgactacattctcaataaatcagtagaaaaacagttcaaggcttttcggagaggttttcatatggtgaccaatgaatctcccttaaagtacttattcagaccagaagaaattgaattgcttatatgtggaagccggaatctagatttccaagcactagaagaaactacagaatatgacggtggctataccagggactctgttctgattagggagttctgggaaatcgttcattcatttacagatgaacagaaaagactcttcttgcagtttacaacgggcacagacagagcacctgtgggaggactaggaaaattaaagatgattatagccaaaaatggcccagacacagaaaggttacctacatctcatacttgctttaatgtgcttttacttccggaatactcaagcaaagaaaaacttaaagagagattgttgaaggccatcacgtatgccaaaggatttggcatgctgtaaaacaaaacaaaacaaaataaaacaaaaaaaaggaaggaaaaaaaaagaaaaaatttaaaaaattttaaaaatataacgagggataaatttttggtggtgatagtgtcccagtacaaaaaggctgtaagatagtcaaccacagtagtcacctatgtctgtgcctcccttctttattggggacatgtgggctggaacagcagatttcagctacatatatgaacaaatcctttattattattataattatttttttgcgtgaaagtgttacatattctttcacttgtatgtacagagaggtttttctgaatatttattttaagggttaaatcacttttgcttgtgtttattactgcttgaggttgagccttttgagtatttaaaaaatatataccaacagaactactctcccaaggaaaatattgccaccatttgtagaccacgtaaccttcaagtatgtgctacttttttgtccctgtatctaactcaaatcaggaactgtattttttttaatgatttgcttttgaaacttgaagtcttgaaaacagtgtgatgcaattactgctgttctagcccccaaagagttttctgtgcaaaatcttgagaatcaatcaataaagaaagatggaaggaagggagaaattggaatgttttaactgcagccctcagaactttagtaacagcacaacaaattaaaaacaaaaacaactcatgccacagtatgtcgtcttcatgtgtcttgcaatgaactgtttcagtagccaatcctctttcttagtatatgaaaggacagggatttttgttcttgttgttctcgttgttgttttaagtttactggggaaagtgcatttggccaaatgaaatggtagtcaagcctattgcaacaaagttaggaagtttgttgtttgtttattataaacaaaaagcatgtgaaagtgcacttaagatagagtttttattaattacttacttattacctagattttaaatagacaatccaaagtctccccttcgtgttgccatcatcttgttgaatcagccattttatcgaggcacgtgatcagtgttgcaacataatgaaaaagatggctactgtgccttgtgttacttaatcatacagtaagctgacctggaaatgaatgaaactattactcctaagaattacattgtatagccccacagattaaatttaattaattaattcaaaacatgttaaacgttactttcatgtactatggaaaagtacaagtaggtttacattactgatttccagaagtaagtagtttcccctttcctagtcttctgtgtatgtgatgttgttaatttcttttattgcattataaaataaaaggattatgtatttttaactaaggtgagacattgatatatccttttgctacaagctatagctaatgtgctgagcttgtgccttggtgattgattgattgattgactgattgttttaactgattactgtagatcaacctgatgatttgtttgtttgaaattggcaggaaaaatgcagctttcaaatcattggggggagaaaaaggatgtctttcaggattattttaattaatttttttcataattgagacagaactgtttgttatgtaccataatgctaaataaaactgtggcacttttcaccataatttaatttagtggaaaaagaagacaatgctttccatattgtgataaggtaacatggggtttttctgggccagcctttagaacactgttagggtacatacgctaccttgatgaaagggaccttcgtgcaactgtagtcatcttaaaggcttctcatccactgtgcttcttaatgtgtaattaaagtgaggagaaattaaatactctgagggcgttttatataataaattcgtgaaga

SEQ ID NO: 89 - DNA, 1403 bp, HOMO SAPIENS
ggcggtgcccttgcggcgcagctggggtcgcggccctgctccccgcgctttcttaaggcccgcgggcggcgcaggagcggcactcgtggctgtggtggcttcggcagcggcttcagcagatcggcggcatcagcggtagcaccagcactagcagcatgttgagccgggcagtgtgcggcaccagcaggcagctggctccggttttggggtatctgggctccaggcagaagcacagcctccccgacctgccctacgactacggcgccctggaacctcacatcaacgcgcagatcatgcagctgcaccacagcaagcaccacgcggcctacgtgaacaacctgaacgtcaccgaggagaagtaccaggaggcgttggccaagggagatgttacagcccagatagctcttcagcctgcactgaagttcaatggtggtggtcatatcaatcatagcattttctggacaaacctcagccctaacggtggtggagaacccaaaggggagttgctggaagccatcaaacgtgactttggttcctttgacaagtttaaggagaagctgacggctgcatctgttggtgtccaaggctcaggttggggttggcttggtttcaataaggaacggggacacttacaaattgctgcttgtccaaatcaggatccactgcaaggaacaacaggccttattccactgctggggattgatgtgtgggagcacgcttactaccttcagtataaaaatgtcaggcctgattatctaaaagctatttggaatgtaatcaactgggagaatgtaactgaaagatacatggcttgcaaaaagtaaaccacgatcgttatgctgagtatgttaagctctttatgactgtttttgtagtggtatagagtactgcagaatacagtaagctgctctattgtagcatttcttgatgttgcttagtcacttatttcataaacaacttaatgttctgaataatttcttactaaacattttgttattgggcaagtgattgaaaatagtaaatgctttgtgtgattgaatctgattggacattttcttcagagagctaaattacaattgtcatttataaaaccatcaaaaatattccatccatatactttggggacttgtagggatgcctttctagtcctattctattgcagttatagaaaatctagtcttttgccccagttacttaaaaataaaatattaacactttcccaagggaaacactcggctttctatagaaaattgcactttttgtcgataatcccagcactttgggaggccaaggcaggcagaacacttgaaggagttcaagaccagcgtggccaacgtggtgaaaccctgtctctactaaaaatacaaaaattgtttagctctgtttttcataatagaaataga

SEQ ID NO: 90 - DNA, 3606 bp, HOMO SAPIENS
attggctgagcccggctgtcagtcctttcgcgcctcggcggcgcggcatagcccggctcggcctgtaaagcagtctcaagcctgccgcagggagaagatggcggtcgccgtgagaactttgcaggaacagctggaaaaggccaaagagagtcttaagaacgtggatgagaacattcgcaagctcaccgggcgggatccgaatgacgtgaggcccatccaagccagattgctggccctttctggtcctggtggaggtagaggacgtggtagtttattactgaggcgtggattctcagatagtggaggaggacccccagccaaacagagagaccttgaaggggcagtcagtaggctgggcggggagcgtcggaccagaagagaatcacgccaggaaagcgacccggaggatgatgatgttaaaaagccagcattgcagtcttcagttgtagctacctccaaagagcgcacacgtagagaccttatccaggatcaaaatatggatgaaaagggaaagcaaaggaaccggcgaatatttggcttgttgatgggtacccttcaaaaatttaaacaagaatccactgttgctactgaaaggcaaaagcggcgccaggaaattgaacaaaaacttgaagttcaggcagaagaagagagaaagcaggttgaaaatgaaaggagagaactgtttgaagagaggcgtgctaaacagacagaactgcggcttttggaacagaaagttgagcttgcgcagctgcaagaagaatggaatgaacataatgccaaaataattaaatatataagaactaagacaaagccccatttgttttatattcctggaagaatgtgtccagctacccaaaaactaatagaagagtcacagagaaaaatgaacgctttatttgaaggtagacgcatcgaatttgcagaacaaataaataaaatggaggctaggcctagaagacaatcaatgaaggaaaaagagcatcaggtggtgcgtaatgaagaacagaaggcggaacaagaagagggtaaggtggctcagcgagaggaagagttggaggagacaggtaatcagcacaatgatgtagaaatagaggaagcaggagaggaagaggaaaaggaaatagcgattgttcatagtgatgcagagaaagaacaggaggaggaagaacaaaaacaggaaatggaggttaagatggaggaggaaactgaggtaagggaaagtgagaagcagcaggatagtcagcctgaagaagttatggatgtgctagagatggttgagaatgtcaaacatgtaattgctgaccaggaggtaatggaaactaatcgagttgaaagtgtagaaccttcagaaaatgaagctagcaaagaattggaaccagaaatggaatttgaaattgagccagataaagaatgtaaatccctttctcctgggaaagagaatgtcagtgctttagacatggaaaaggagtctgaggaaaaagaagaaaaagaatctgagccccaacctgagcctgtggctcaacctcagcctcagtctcagccccagcttcagcttcaatcccagtcccaaccagtactccagtcccagcctccctctcagcctgaggatttgtcattagctgttttacagccaacaccccaagttactcaggagcaagggcatttactacctgagaggaaggattttcctgtagagtctgtaaaactcactgaggtaccagtagagccagtcttgacagtacatccagagagcaagagcaaaaccaaaactaggagcagaagtagaggtcgagctagaaataaaacaagcaagagtagaagtcgaagcagtagcagtagcagttctagtagcagttcaaccagtagcagcagtggaagtagttccagcagtggaagtagtagcagtcgcagtagttccagtagcagctccagtacaagtggcagcagcagcagagatagtagcagtagcactagtagtagtagtgagagtagaagtcggagtaggggccggggacataatagagatagaaagcacagaaggagcgtggatcggaagagaagggatacttcaggactagaaagaagtcacaaatcttcaaaaggtggtagtagtagagatacaaaaggatcaaaggataagaattcccggtccgacagaaagaggtctatatcagagagtagtcgatcaggcaaaagatcttcaagaagtgaaagagaccgaaaatcagacaggaaagacaaaaggcgttaatggaagaagccaggctttcttagccattctttgcagcagaagatttcttgataaaaaaggattacctttccttgtaaagaggatgctgccttaagaattgcatgttgtaaaaaatctttttggaaaatacagactgtttgtttaccagacattcttgtactttttgcataattttgtaagagttatttatcaaaattatgtgaggttccaaaatatgtaaaaatgataataataaaaaaagattaacatcccttgtcatcttttttaaatatcctatactcttcagtaagaatctgtatattttaataggcaaatctttaagtctgttcccttctaattctgtatcatacattgcttttgtagaaataaatgtgtgtttatttcattatttttgggatgtcctcgttgacacttgtataataaatatcctctttatcattttcagcttttaacactagatactgcacgtgattagaatgtttttgaaggtttcctcgtttttatttgccttggacagtttttagttgtcagagtcagagctttgcagctttgagggggaacagttctctttaaaatcatttgctattttctattctcccttgttattttaatctaagcattttcccccgtttctcatattttaaccatatgttcggtagataactaaacagtatgatctggttggcattttcttcctgatgatgggagcgtcattcttttgtcttcatggttacttgtgtgatataacatacatctgttaaagaaaatcacttctttctaggggagggaggtagaaaagtatctttcaaacttggtttttgagtttgtgtcttgtcttaactttgtgttggctctaacttaaacatgctgatatgtgttttcaagaattttgtttaaggaagtattgtatggaagtccacaaaatgaaggaagttcatctaggttttaatatgtaagcaagataacacacaagtgtaccaagtgattattaactttgttgttttacaaatttgtatgaacttggagtatctgttggccattactatacatgtgcaaataaatgtggcttagacttgtgtgactgcttaagactagtacttgtattaactttctgatgctttatacaagagagcacttaaattgcatccttctttgagtttaacactgtagctttagccttgactttgaatattcattttgccttcccttgacaagtaaatggttacagtgaaaatgtgaagaagtatttccagttagtttttgtgtgtatataactcacttgtgtaagtggatgtgttaaaagatctctttttaaaaatccttttattggagtaattattaaaacagtaaatgca

SEQ ID NO: 91 - DNA, 2611 bp, HOMO SAPIENS
gcaggcgcagagtccccgggccaagatggctgcgcggtgctccacacgctggttgctggtggttgtggggaccccgcggctgccggctatatcgggtagaggggcccggccgcccagggagggcgtggtgggggcatggctgagccgcaagctgagcgtccccgcctttgcgtcttccctgacctcttgcggcccccgagcgctgctgacattgagacctggtgtcagccttacaggaacaaaacataaccctttcatttgtactgcctccttccacacgagtgcccctttggccaaagaagattattatcagatattaggagtgcctcgaaatgccagccagaaagagatcaagaaagcctattatcagcttgccaagaagtatcaccctgacacaaataaggatgatcccaaagccaaggagaagttctcccagctggcagaagcctatgaggttttgagtgatgaggtgaagaggaagcagtacgatgcctacggctctgcaggcttcgatcctggggccagcggctcccagcatagctactggaagggaggccccactgtggaccccgaggagctgttcaggaagatctttggcgagttctcatcctcttcatttggagatttccagaccgtgtttgatcagcctcaggaatacttcatggagttgacattcaatcaagctgcaaagggggtcaacaaggagttcaccgtgaacatcatggacacgtgtgagcgctgcaacggcaaggggaacgagcccggcaccaaggtgcagcattgccactactgtggcggctccggcatggaaaccatcaacacaggcccttttgtgatgcgttccacgtgtaggagatgtggtggccgcggctccatcatcatatcgccctgtgtggtctgcaggggagcaggacaagccaagcagaaaaagcgagtgatgatccctgtgcctgcaggagtcgaggatggccagaccgtgaggatgcctgtgggaaaaagggaaattttcattacgttcagggtgcagaaaagccctgtgttccggagggacggcgcagacatccactccgacctctttatttctatagctcaggctcttcttgggggtacagccagagcccagggcctgtacgagacgatcaacgtgacgatcccccctgggactcagacagaccagaagattcggatgggtgggaaaggcatcccccggattaacagctacggctacggagaccactacatccacatcaagatacgagttccaaagaggctaacgagccggcagcagagcctgatcctgagctacgccgaggacgagacagatgtggaggggacggtgaacggcgtcaccctcaccagctctggaaaaagatccactggaaactaggccgggaagcagcagcccctccaagggccagggcacctgggagacgggaggattccagaacagcagcactgagctcccacccgcagagcctctggacggccttggcaacagcaaaatcatgggacaacacctctctccacggaaaggtcacagtggacagcccgggcagtaggatgcagccccagaggctggtggcagtttcctgtccattggtaggtgacggcccctggctcaggcagagggagatggttagactcttgcagggctaaaactctaatttggaattgaatattgtggatatcttagttaaaggccatgcttacagcttagaaatgaagccttaagctgcatcaagttacgaagtgattaatttccttctcagcaaacctccgggaggttccagaatgagttcttcctgacaggttgtcttcactgggagcgtggggcccccaggccccaccagcaccgtcctcccctaatgaggggccctgccgaggcatcagctgctctgctcagttagtttttattcccggggtaccaagcagctgcacagtcggtgcctgggaggcacgtagaggcccagagagtccctgggggttctgctctgaccgtgtgggtggtgatccttgtcaggatgtacagtccttgctcccaccccatccgggatggccgcctgtccctgactattgagtcctgttgttgtaagccaggcatggagggctcctgcccttctgctgagccacagcccattgcagcactgtgctggccagacttcagctgccttgggaactgaagccctgccactgttgctagtcaggggcttggttctcccacttacactgttgacatctattttctgaagtgtgtttaaattattcagtgctaatcattgttttttcctttgtaaatgttgattcagaaaaggaaagcacaggctaagcagttgaaggttccccaccattcagtgagagcagaacccccattccccagcctctgctggtagcatgtcgcagtttccatgtgtttcaggatcttcgggctgtcgttagacaggttaatgaagaacacttctcaacagtttcctttttgttttcctttataattcactaaaataaagcatctattagtgtctgatttaggaatgtaaaatgattctgtattaatgtaaataagattatctattgcaaaaagatatttcaaacctaaaaaaaaaaaaaaaaaaaa

SEQ ID NO: 92 - DNA, 2245 bp, HOMO SAPIENS
acgcgacccgccctacgggcacctcccgcgcttttcttagcgccgcagacggtggccgagcgggggaccgggaagcatggcccgggggtcggcggttgcctgggcggcgctcgggccgttgttgtggggctgcgcgctggggctgcagggcgggatgctgtacccccaggagagcccgtcgcgggagtgcaaggagctggacggcctctggagcttccgcgccgacttctctgacaaccgacgccggggcttcgaggagcagtggtaccggcggccgctgtgggagtcaggccccaccgtggacatgccagttccctccagcttcaatgacatcagccaggactggcgtctgcggcattttgtcggctgggtgtggtacgaacgggaggtgatcctgccggagcgatggacccaggacctgcgcacaagagtggtgctgaggattggcagtgcccattcctatgccatcgtgtgggtgaatggggtcgacacgctagagcatgaggggggctacctccccttcgaggccgacatcagcaacctggtccaggtggggcccctgccctcccggctccgaatcactatcgccatcaacaacacactcacccccaccaccctgccaccagggaccatccaatacctgactgacacctccaagtatcccaagggttactttgtccagaacacatattttgactttttcaactacgctggactgcagcggtctgtacttctgtacacgacacccaccacctacatcgatgacatcaccgtcaccaccagcgtggagcaagacagtgggctggtgaattaccagatctctgtcaagggcagtaacctgttcaagttggaagtgcgtcttttggatgcagaaaacaaagtcgtggcgaatgggactgggacccagggccaacttaaggtgccaggtgtcagcctctggtggccgtacctgatgcacgaacgccctgcctatctgtattcattggaggtgcagctgactgcacagacgtcactggggcctgtgtctgacttctacacactccctgtggggatccgcactgtggctgtcaccaagagccagttcctcatcaatgggaaacctttctatttccacggtgtcaacaagcatgaggatgcggacatccgagggaagggcttcgactggccgctgctggtgaaggacttcaacctgcttcgctggcttggtgccaacgctttccgtaccagccactacccctatgcagaggaagtgatgcagatgtgtgaccgctatgggattgtggtcatcgatgagtgtcccggcgtgggcctggcgctgccgcagttcttcaacaacgtttctctgcatcaccacatgcaggtgatggaagaagtggtgcgtagggacaagaaccaccccgcggtcgtgatgtggtctgtggccaacgagcctgcgtcccacctagaatctgctggctactacttgaagatggtgatcgctcacaccaaatccttggacccctcccggcctgtgacctttgtgagcaactctaactatgcagcagacaagggggctccgtatgtggatgtgatctgtttgaacagctactactcttggtatcacgactacgggcacctggagttgattcagctgcagctggccacccagtttgagaactggtataagaagtatcagaagcccattattcagagcgagtatggagcagaaacgattgcagggtttcaccaggatccacctctgatgttcactgaagagtaccagaaaagtctgctagagcagtaccatctgggtctggatcaaaaacgcagaaaatacgtggttggagagctcatttggaattttgccgatttcatgactgaacagtcaccgacgagagtgctggggaataaaaaggggatcttcactcggcagagacaaccaaaaagtgcagcgttccttttgcgagagagatactggaagattgccaatgaaaccaggtatccccactcagtagccaagtcacaatgtttggaaaacagcccgtttacttgagcaagactgataccacctgcgtgtcccttcctccccgagtcagggcgacttccacagcagcagaacaagtgcctcctggactgttcacggcagaccagaacgtttctggcctgggttttgtggtcatctattctagcagggaacactaaaggtggaaataaaagattttctattatggaaataaagagttggcatgaaagtggctactgaaaa

SEQ ID NO: 93 - DNA, 2021 bp, HOMO SAPIENS
ggcctgggcgcgccgagctccggctgggtccctgcaggtcttggggcccgggactcttcctggagacaccgccatggccgggctatcccgcgggtccgcgcgcgcactgctcgccgccctgctggcgtcgacgctgttggcgctgctcgtgtcgcccgcgcggggtcgcggcggccgggaccacggggactgggacgaggcctcccggctgccgccgctaccaccccgcgaggacgcggcgcgcgtggcccgcttcgtgacgcacgtctccgactggggcgctctggccaccatctccacgctggaggcggtgcgcggccggcccttcgccgacgtcctctcgctcagcgacgggcccccgggcgcgggcagcggcgtgccctatttctacctgagcccgctgcagctctccgtgagcaacctgcaggagaatccatatgctacactgaccatgactttggcacagaccaacttctgcaagaaacatggatttgatccacaaagtcccctttgtgttcacataatgctgtcaggaactgtgaccaaggtgaatgaaacagaaatggatattgcaaagcattcgttattcattcgacaccctgagatgaaaacctggccttccagccataattggttctttgctaagttgaatataaccaatatctgggtcctggactactttggtggaccaaaaatcgtgacaccagaagaatattataatgtcacagttcagtgaagcagactgtggtgaatttagcaacacttatgaagtttcttaaagtggctcatacacacttaaaaggcttaatgtttctctggaaagcgtcccagaatattagccagttttctgtcacatgctggtttgtttgcttgcttgtttacttgcttgtttaccaatagagttgacctgttattggatttcctggaagatgtggtagctacttttttcctattttgaagccattttcgtagagaaatatccttcactataatcaaataagttttgtcccatcaattccaaagatgtttccagtggtgctcttgaagaggaatgagtaccagttttaaattgcccattggcatttgaaggtagttgagtatgtgttctttattcctagaagccactgtgcttggtagagtgcatcactcaccacagctgcctcctgagctgcctgagcctggtgcaaaaggattggcccccattatggtgcttctgaataaatcttgccaagatagacaaacaatgatgaaactcagatggagcttcctactcatgttgatttatgtctcacaatcctgggtattgttaattcaacatagggtgaaactatttctgataaagaacttttgaaaaactttttatactctaaagtgatactcagaacaaaagaaagtcataaaactcctgaatttaatttccccacctaagtcgagacagtattatcaaaacacatgtgcacacagattattttttggctccaaaactggattgcaaaagaaagaggagaagaatattttgtgtgttcctggtattcttttataagtaaagtttacccaggcatggaccagcttcagccagggacaaaatcccctcccaaaccactctccacagctttttaaaaatacttctactcttaacaattacctaaggcttcctcaactgccccaaatctcttaatagcttctagtgctgctacaatctaagtcaggtcaccagagggaagagaacatggcattaaaagaatcacatcttcagaagagaagacactaatattattacccatatacatgatttcagaagatgacataagattcctcttaaagaggaaatgtcaggaatcaagccactgaatccttaaagagaaaagttgaatatgagtcattgtgtctgaaaactgcaaagtgaacttaactgagatccagcaaacaggttctgtttaagaaaaataatttatactaaatttagtaaaatggacttcttattcaaagcatcaataattaaaagaattattttaatgaaa

SEQ ID NO: 94 - DNA, 1584 bp, HOMO SAPIENS
gttggttggagcgtcgcgcagtcgggaggtccgggaaagtttctttggaggtccggcccggagcggccatgtcccacggccccaagcagcccggcgcggccgccgcgccggcgggcggcaaggctccgggccagcatgggggcttcgtggtgactgtcaagcaagagcgcggcgagggtccacgcgcgggcgagaaggggtcccacgaggaggagccggtgaagaaacgcggctggcccaagggcaagaagcggaagaagattctgccgaatgggcccaaggcaccggtcacgggctacgtgcgcttcctgaacgagcggcgcgagcagatccgcacgcgccacccggatctgccctttcccgagatcaccaagatgctgggcgccgagtggagcaagctgcagccaacggaaaagcagcggtacctggatgaggccgagagagagaagcagcagtacatgaaggagctgcgggcgtaccagcagtctgaagcctataagatgtgcacggagaagatccaggagaagaagatcaagaaagaagactcgagctctgggctcatgaacactctcctgaatggacacaagggtggggactgcgatggcttctccaccttcgatgttcccatcttcactgaagagttcttggaccaaaacaaagcgcgtgaggcggagcttcggcgcttgcggaagatgaatgtggccttcgaggagcagaacgcggtactgcagaggcacacgcagagcatgagcagcgcgcgcgagcgtctggagcaggagctggcgctggaggagcggaggacgctggcgctgcagcagcagctccaggccgtgcgccaggcgctcaccgccagcttcgcctcactgccggtgccgggcacgggcgaaacgcccacgctgggcactctggacttctacatggcccggcttcacggagccatcgagcgcgaccccgcccagcacgagaagctcatcgtccgcatcaaggaaatcctggcccaggtcgccagcgagcacctgtgaggagtgggcgggcccacgatgcagaggagaagctgtgggcgcggccctgccacaccccaccccgtggacgagaggctgggggtccaccctttggggcctggtcccatcctgcaccttgggggctccagcccccctaaaattaaatttctgcagcatccctttagctttcaatctccccagccccctgaacccggaaaaagcactcgctgcgcgatacacccagaagaacctcacagccgagggtgcccctcctcggaggacagccacgcgctacactggctctccgggccacccccaggacacagggcagacgaaacccacccccagcacacggcaggaccccccaaattactcactacggggggctgtgccataggccacacaggaagctgccttgtggggacttacctggggtgtcccccgcatgcctgtaccccagatgggtgggggccggctttgcccatcctgctctcctccagccgagggaccctggtgggggtggctccttctcactgctggatccggactttttaaataaaaacaagtaaaatttgtgttttaa

SEQ ID NO: 95 - DNA, 3765 bp, HOMO SAPIENS
aggactcccagacccctcaccttctgcctcccctggtcgcgtccgggtccttgcggagctaactagctcgccacgacgtcaagaacgacgtaacgtcaggccgctgtgggctctgggaattgtagtccagagctagatcggccacggacagaatggcgttctcttatctctgagtcggggcctggctcgttttgacatttttgcgcccacgagtcttcggagagggcgtcgccactccagaccttccagcaagcttgaagtcatctgacgctaaaggactacttacctcaagagctccatcgtcacagaaggaggcggccaagttcgcggggggaggggaggagacagagagtcgaccagtaaagcctcaagggaaatgtagtccaaggcctgagaagcgacgttgctggtaatagaaggtaattcagtaccagcctgggcctggccgcggtgaccgaggcgggccgcgtcgcggagacttctgggagtgcttcctcgctctccgagtgcgcaagcgcagcgcaccgagtggacattttggtctttgtccgcggttaatatgatcctctgttgaagcaagaagacaaactgtatggtggagaaagaagtgggaaggatctgcgcggaagaagcctgagaagatgatgcacagatagagaggcaccaggacttgagaggcaccaggacttgggaggcatgttgatccatctccaggaaagactgagaaaaagagcgttgaatataagaaaaaatacttcctctgttctcagatcgtatttgttttaaggccacacctttttgaagttttcagtttgaaacacaacctggactgaaatcatgagggaggttgtgtaggaaagaatcatcaagggacttagttgggagcttctctaccacagcttactccttatggtattaaccccctttaagtgtaaatgtctttggtttaaaacgtttgtacctcatctgttaccagagtgttcatactggagagaaaccctatgaatttactgaatgtgggggaactgttactcatatgttgcatttcgtcgaacgtgcaagtcatgctgaagagaaaccctgtgcttctaaggagtattgacaagcccttagctagatgacaatctcattgagaagcagaaaattcatgctggagagaaactagtgaaggtagcaatacttcattgaatattagaaaatttttctagagagaaagcattgaatatactgagtatgataacatttcctctcaaaccttatcccttactctgcatttgggagatcatacacagagaagccttataaatgtaagagatgtggaaatatcttcagccaaaagtaaatcctcactcatcaagaaatttttactggagagaaaccttgtgaatgtgggaaagcttccattcagatgtcacacctcagccagcagagaatttacagtggggaaaacccctttgcctgtaaggtatgtggaaaagtcttcagccacaaatcaaacctcactgagcatgagcattttcacacgagagagaaaccttttgaatgtaacgagtgtggaaaagcctttagccaaaagcagtatgtcattaaacatcagaacacccatactggcgagaagcttttcgaatgtaatgaatgtggaaaatcatttagccagaaggaaaacctccttacgcaccagaaaattcacactggagaaaaaccttttgagtgtaaagattgcgggaaagctttcattcagaagtcaaacctcatcagacaccagagaactcacacaggagagaagccctttgtatgtaaggagtgtggaaaaaccttcagtggcaaatccaaccttactgagcatgagaaaatccatattggagagaagccttttaaatgtagtgaatgtggaacagcctttggccagaagaagtacctcataaaacatcagaacattcacactggagagaaaccctatgaatgtaacgaatgtggaaaagccttctctcagcgaacatcacttattgtacatgtgaggattcattcaggtgataaaccttacgaatgcaatgtttgtggaaaagccttctctcagagctcatctctcactgtgcatgtgagaagccatacaggggagaagccctatggttgtaatgaatgtgggaaagctttctctcagttctcaacccttgctctgcatttgagaatacacacaggtaagaagccttatcagtgcagtgaatgtgggaaagctttcagccagaagtcacaccacattagacaccagaaaattcatactcactaaaaaccccatgaaagccttgaaagtgggaaagctttcattagaaatttgcacctcatcatgccccagaaataatccttctgaagcaaagcaccacgaatgaggttaactttaacaagtactaaaaacttaagggacaccagaaaatttgtactgaagagaaagacatgcatatgattaaaaccctgtgtccaacagagaaacctgcagcagagataatggtgaaagtttaggcacattttcactaaaagtgggaacagaaaatggaggcctgttttttattgctaccaccatagatctggagatcttcgccagtaacaagaaaaattaagttgtaaatattggaaaggaacagacaaaaatagatgacatggtcatctacaactaatattaagactcctgtggtattgattgagcagagcagaagagatttcaaaaaaagacctatgcatttattagaatttggaatatgatacaagtggcatcaggaaatgaggaaataatggaactattttttttaagtggaggtagtttgttctccaagggggaaaaatagaccatgaactatacacaaaagtgaatccagagattaaaaacagaaatatggaaaagctatgtactaaaatgcatatgaccttgggaatagggaaacattccttggaacaatttgagaaatacttagcggttctacttatgagtatgaatgctcaggaaatacgcactaggatatttactgtggcttgatttgtagtagccaaaaattagaaacaactgagaaagcccatcacgaacaatatgggaaattcttatgtaatactatatatctgtaaaatgcaacaaatgaaatccacatgtattaacagaaagatcccagaattgttgaggggggatcaagttgcagaatgatacagatagtacaatgacttttttgtaaatttgaattaaaagtttcctcataaaactcagtactatctattggtaatggatgcatatatgtatgtacatgtttttgaaacggattggaaggatacagaccaaactcttgatagtggtcacctgtgaagagtggagaagggaaaataatgagtgtgggaggtgggatgggtattggttaaaggggacttcagctttttatataaacatccacttctctttcaaaagacttcaagtaaatataagaagatactgattgattctggattgtggtatagggatatcttgtcttattttttgtacttttctgtatttttaaaatttctcaaaataggaatgggagtgaggatgggaatgctgtatctgtggaagtcatgttatactggattcatttccaattaaatactaaacattttatagaaaatatttctaaaattttatcacggatgaatggatggacttgctctctatgtaatatgaaattaatctattttattaaaatttaaaaggacagcacaatccaaaaaaaaaaaaaaaaaaaaaaaaaa

SEQ ID NO: 96 - DNA, 2323 bp, HOMO SAPIENS
ggcgagaggaagcagggaggagagtgatttgagtagaaaagaaacacagcattccaggctggccccacctctatattgataagtagccaatgggagcgggtagccctgatccctggccaatggaaactgaggtaggcgggtcatcgcgctggggtctgtagtctgagcgctacccggttgctgctgcccaaggaccgcggagtcggacgcaggcagaccatgtggaccctggtgagctgggtggccttaacagcagggctggtggctggaacgcggtgcccagatggtcagttctgccctgtggcctgctgcctggaccccggaggagccagctacagctgctgccgtccccttctggacaaatggcccacaacactgagcaggcatctgggtggcccctgccaggttgatgcccactgctctgccggccactcctgcatctttaccgtctcagggacttccagttgctgccccttcccagaggccgtggcatgcggggatggccatcactgctgcccacggggcttccactgcagtgcagacgggcgatcctgcttccaaagatcaggtaacaactccgtgggtgccatccagtgccctgatagtcagttcgaatgcccggacttctccacgtgctgtgttatggtcgatggctcctgggggtgctgccccatgccccaggcttcctgctgtgaagacagggtgcactgctgtccgcacggtgccttctgcgacctggttcacacccgctgcatcacacccacgggcacccaccccctggcaaagaagctccctgcccagaggactaacagggcagtggccttgtccagctcggtcatgtgtccggacgcacggtcccggtgccctgatggttctacctgctgtgagctgcccagtgggaagtatggctgctgcccaatgcccaacgccacctgctgctccgatcacctgcactgctgcccccaagacactgtgtgtgacctgatccagagtaagtgcctctccaaggagaacgctaccacggacctcctcactaagctgcctgcgcacacagtgggggatgtgaaatgtgacatggaggtgagctgcccagatggctatacctgctgccgtctacagtcgggggcctggggctgctgcccttttacccaggctgtgtgctgtgaggaccacatacactgctgtcccgcggggtttacgtgtgacacgcagaagggtacctgtgaacaggggccccaccaggtgccctggatggagaaggccccagctcacctcagcctgccagacccacaagccttgaagagagatgtcccctgtgataatgtcagcagctgtccctcctccgatacctgctgccaactcacgtctggggagtggggctgctgtccaatcccagaggctgtctgctgctcggaccaccagcactgctgcccccagggctacacgtgtgtagctgaggggcagtgtcagcgaggaagcgagatcgtggctggactggagaagatgcctgcccgccgggcttccttatcccaccccagagacatcggctgtgaccagcacaccagctgcccggtggggcagacctgctgcccgagcctgggtgggagctgggcctgctgccagttgccccatgctgtgtgctgcgaggatcgccagcactgctgcccggctggctacacctgcaacgtgaaggctcgatcctgcgagaaggaagtggtctctgcccagcctgccaccttcctggcccgtagccctcacgtgggtgtgaaggacgtggagtgtggggaaggacacttctgccatgataaccagacctgctgccgagacaaccgacagggctgggcctgctgtccctaccgccagggcgtctgttgtgctgatcggcgccactgctgtcctgctggcttccgctgcgcagccaggggtaccaagtgtttgcgcagggaggccccgcgctgggacgcccctttgagggacccagccttgagacagctgctgtgagggacagtactgaagactctgcagccctcgggaccccactcggagggtgccctctgctcaggcctccctagcacctccccctaaccaaattctccctggaccccattctgagctccccatcaccatgggaggtggggcctcaatctaaggccttccctgtcagaagggggttgtggcaaaagccacattacaagctgccatcccctccccgtttcagtggaccctgtggccaggtgcttttccctatccacaggggtgtttgtgtgtgtgcgcgtgtgcgtttcaataaagtttgtacactttcaaaaaaaaaaaaaaaaaa

SEQ ID NO: 97 - DNA, 1498 bp, HOMO SAPIENS
accaaacctcttcgaggcacaaggcacaacaggctgctctgggattctcttcagccaatcttcattgctcaagtgtctgaagcagccatggcagaagtacctgagctcgccagtgaaatgatggcttattacagtggcaatgaggatgacttgttctttgaagctgatggccctaaacagatgaagtgctccttccaggacctggacctctgccctctggatggcggcatccagctacgaatctccgaccaccactacagcaagggcttcaggcaggccgcgtcagttgttgtggccatggacaagctgaggaagatgctggttccctgcccacagaccttccaggagaatgacctgagcaccttctttcccttcatctttgaagaagaacctatcttcttcgacacatgggataacgaggcttatgtgcacgatgcacctgtacgatcactgaactgcacgctccgggactcacagcaaaaaagcttggtgatgtctggtccatatgaactgaaagctctccacctccagggacaggatatggagcaacaagtggtgttctccatgtcctttgtacaaggagaagaaagtaatgacaaaatacctgtggccttgggcctcaaggaaaagaatctgtacctgtcctgcgtgttgaaagatgataagcccactctacagctggagagtgtagatcccaaaaattacccaaagaagaagatggaaaagcgatttgtcttcaacaagatagaaatcaataacaagctggaatttgagtctgcccagttccccaactggtacatcagcacctctcaagcagaaaacatgcccgtcttcctgggagggaccaaaggcggccaggatataactgacttcaccatgcaatttgtgtcttcctaaagagagctgtacccagagagtcctgtgctgaatgtggactcaatccctagggctggcagaaagggaacagaaaggtttttgagtacggctatagcctggactttcctgttgtctacaccaatgcccaactgcctgccttagggtagtgctaagaggatctcctgtccatcagccaggacagtcagctctctcctttcagggccaatccccagcccttttgttgagccaggcctctctcacctctcctactcacttaaagcccgcctgacagaaaccacggccacatttggttctaagaaaccctctgtcattcgctcccacattctgatgagcaaccgcttccctatttatttatttatttgtttgtttgttttattcattggtctaatttattcaaagggggcaagaagtagcagtgtctgtaaaagagcctagtttttaatagctatggaatcaattcaatttggactggtgtgctctctttaaatcaagtcctttaattaagactgaaaatatataagctcagattatttaaatgggaatatttataaatgagcaaatatcatactgttcaatggttctgaaataaacttcactgaag

SEQ ID NO: 98 - DNA, 1240 bp, HOMO SAPIENS
cacattgttctgatcatctgaagatcagctattagaagagaaagatcagttaagtcctttggacctgatcagcttgatacaagaactactgatttcaacttctttggcttaattctctcggaaacgatgaaatatacaagttatatcttggcttttcagctctgcatcgttttgggttctcttggctgttactgccaggacccatatgtaaaagaagcagaaaaccttaagaaatattttaatgcaggtcattcagatgtagcggataatggaactcttttcttaggcattttgaagaattggaaagaggagagtgacagaaaaataatgcagagccaaattgtctccttttacttcaaactttttaaaaactttaaagatgaccagagcatccaaaagagtgtggagaccatcaaggaagacatgaatgtcaagtttttcaatagcaacaaaaagaaacgagatgacttcgaaaagctgactaattattcggtaactgacttgaatgtccaacgcaaagcaatacatgaactcatccaagtgatggctgaactgtcgccagcagctaaaacagggaagcgaaaaaggagtcagatgctgtttcgaggtcgaagagcatcccagtaatggttgtcctgcctgcaatatttgaattttaaatctaaatctatttattaatatttaacattatttatatggggaatatatttttagactcatcaatcaaataagtatttataatagcaacttttgtgtaatgaaaatgaatatctattaatatatgtattatttataattcctatatcctgtgactgtctcacttaatcctttgttttctgactaattaggcaaggctatgtgattacaaggctttatctcaggggccaactaggcagccaacctaagcaagatcccatgggttgtgtgtttatttcacttgatgatacaatgaacacttataagtgaagtgatactatccagttactgccggtttgaaaatatgcctgcaatctgagccagtgctttaatggcatgtcagacagaacttgaatgtgtcaggtgaccctgatgaaaacatagcatctcaggagatttcatgcctggtgcttccaaatattgttgacaactgtgactgtacccaaatggaaagtaactcatttgttaaaattatcaatatctaatatatatgaataaagtgtaagttcacaacaaaaaaaaaaaaaaaaaaaaaaaaaaaaaa

SEQ ID NO: 99 - DNA, 1743 bp, HOMO SAPIENS
agtgcagcgcagaagacagagggtgactaggaagacgcgcgagcggggctggccggccggcgggtgggggaggggaggcgggggaaggcggctgagtgggcctctggagtgtgtgtgtctgtgtcagtgtgtgtgtgtgtgtgtgtatgtgtgtgtctggcgcctggccagggtgatttcccataaaccacatgccccccagtcctctcttaaaaggctgtgccgagggctggccagtgaggctcggcccggggaaagtgaaagtttgcctgggtcctctcggcgccagagccgctctccgcatcccaggacagcggtgcggccctcggccggggcgcccactccgcagcagccagcgagcgagcgagcgagcgagggcggccgacgcgcccggccgggacccagctgcccgtatgaccgcgccgggcgccgccgggcgctgccctcccacgacatggctgggctccctgctgttgttggtctgtctcctggcgagcaggagtatcaccgaggaggtgtcggagtactgtagccacatgattgggagtggacacctgcagtctctgcagcggctgattgacagtcagatggagacctcgtgccaaattacatttgagtttgtagaccaggaacagttgaaagatccagtgtgctaccttaagaaggcatttctcctggtacaagacataatggaggacaccatgcgcttcagagataacacccccaatgccatcgccattgtgcagctgcaggaactctctttgaggctgaagagctgcttcaccaaggattatgaagagcatgacaaggcctgcgtccgaactttctatgagacacctctccagttgctggagaaggtcaagaatgtctttaatgaaacaaagaatctccttgacaaggactggaatattttcagcaagaactgcaacaacagctttgctgaatgctccagccaagatgtggtgaccaagcctgattgcaactgcctgtaccccaaagccatccctagcagtgacccggcctctgtctcccctcatcagcccctcgccccctccatggcccctgtggctggcttgacctgggaggactctgagggaactgagggcagctccctcttgcctggtgagcagcccctgcacacagtggatccaggcagtgccaagcagcggccacccaggagcacctgccagagctttgagccgccagagaccccagttgtcaaggacagcaccatcggtggctcaccacagcctcgcccctctgtcggggccttcaaccccgggatggaggatattcttgactctgcaatgggcactaattgggtcccagaagaagcctctggagaggccagtgagattcccgtaccccaagggacagagctttccccctccaggccaggagggggcagcatgcagacagagcccgccagacccagcaacttcctctcagcatcttctccactccctgcatcagcaaagggccaacagccggcagatgtaactggccatgagaggcagtccgagggatcctccagcccgcagctccaggagtctgtcttccacctgctggtgcccagtgtcatcctggtcttgctggccgtcggaggcctcttgttctacaggtggaggcggcggagccatcaagagcctcagagagcggattctcccttggagcaaccagagggcagccccctgactcaggatgacagacaggtggaactgccagtgtagagggaattctaag

SEQ ID NO: 100 - DNA, 2503 bp, HOMO SAPIENS
cgctcttattggccaggggacggtagctgcaggactctgctctcctgcggccatgggccagggttgggctactgcaggacttcccagcctcctcttcctgctgctctgctacgggcaccctctgctggtccccagccaggaggcatcccaacaggtgacagtcacccatgggacaagcagccaggcaacaaccagcagccagacaaccacccaccaggcgacggcccaccagacatcagcccagagcccaaacctggtgactgatgaggctgaggccagcaagtttgtggaggaatatgaccggacatcccaggtggtgtggaacgagtatgccgaggccaactggaactacaacaccaacatcaccacagagaccagcaagattctgctgcagaagaacatgcaaatagccaaccacaccctgaagtacggcacccaggccaggaagtttgatgtgaaccagttgcagaacaccactatcaagcggatcataaagaaggttcaggacctagaacgggcagcactgcctgcccaggagctggaggagtacaacaagatcctgttggatatggaaaccacctacagcgtggccactgtgtgccacccgaatggcagctgcctgcagctcgagccagatctgacgaatgtgatggccacgtcccggaaatatgaagacctgttatgggcatgggagggctggcgagacaaggcggggagagccatcctccagttttacccgaaatacgtggaactcatcaaccaggctgcccggctcaatggctatgtagatgcaggggactcgtggaggtctatgtacgagacaccatccctggagcaagacctggagcggctcttccaggagctgcagccactctacctcaacctgcatgcctacgtgcgccgggccctgcaccgtcactacggggcccagcacatcaacctggaggggcccattcctgctcacctgctggggaacatgtgggcgcagacctggtccaacatctatgacttggtggtgcccttcccttcagccccctcgatggacaccacagaggctatgctaaagcagggctggacgcccaggaggatgtttaaggaggctgatgatttcttcacctccctggggctgctgcccgtgcctcctgagttctggaacaagtcgatgctggagaagccaaccgacgggcgggaggtggtctgccacgcctcggcctgggacttctacaacggcaaggacttccggatcaagcagtgcaccaccgtgaacttggaggacctggtggtggcccaccacgaaatgggccacatccagtatttcatgcagtacaaagacttacctgtggccttgagggagggtgccaaccccggcttccatgaggccattggggacgtgctagccctctcagtgtctacgcccaagcacctgcacagtctcaacctgctgagcagtgagggtggcagcgacgagcatgacatcaactttctgatgaagatggcccttgacaagatcgcctttatccccttcagctacctcgtcgatcagtggcgctggagggtatttgatggaagcatcaccaaggagaactataaccaggagtggtggagcctcaggctgaagtaccagggcctctgccccccagtgcccaggactcaaggtgactttgacccaggggccaagttccacattccttctagcgtgccttacatcaggtactttgtcagcttcatcatccagttccagttccacgaggcactgtgccaggcagctggccacacgggccccctgcacaagtgtgacatctaccagtccaaggaggccgggcagcgcctggcgaccgccatgaagctgggcttcagtaggccgtggccggaagccatgcagctgatcacgggccagcccaacatgagcgcctcggccatgttgagctacttcaagccgctgctggactggctccgcacggagaacgagctgcatggggagaagctgggctggccgcagtacaactggacgccgaactccgctcgctcagaagggcccctcccagacagcggccgcgtcagcttcctgggcctggacctggatgcgcagcaggcccgcgtgggccagtggctgctgctcttcctgggcatcgccctgctggtagccaccctgggcctcagccagcggctcttcagcatccgccaccgcagcctccaccggcactcccacgggccccagttcggctccgaggtggagctgagacactcctgaggtgacccggctgggtcggccctgcccaagggcctcccaccagagactgggatgggaacactggtgggcagctgaggacacaccccacaccccagcccaccctgctcctcctgccctgtccctgtccccctcccctcccagtcctccagaccaccagccgccccagccccttctcccagcacacggctgcctgacactgagccccacctctccaagtctctctgtgaatacaattaaaggtcctgccctccc

SEQ ID NO: 101 - DNA, 1237 bp, HOMO SAPIENS
gctgcagaggattcctgcagaggatcaagacagcacgtggacctcgcacagcctctcccacaggtaccatgaaggtctccgcggcagccctcgctgtcatcctcattgctactgccctctgcgctcctgcatctgcctccccatattcctcggacaccacaccctgctgctttgcctacattgcccgcccactgccccgtgcccacatcaaggagtatttctacaccagtggcaagtgctccaacccagcagtcgtctttgtcacccgaaagaaccgccaagtgtgtgccaacccagagaagaaatgggttcgggagtacatcaactctttggagatgagctaggatggagagtccttgaacctgaacttacacaaatttgcctgtttctgcttgctcttgtcctagcttgggaggcttcccctcactatcctaccccacccgctccttgaagggcccagattctaccacacagcagcagttacaaaaaccttccccaggctggacgtggtggctcacgcctgtaatcccagcactttgggaggccaaggtgggtggatcacttgaggtcaggagttcgagaccagcctggccaacatgatgaaaccccatctctactaaaaatacaaaaaattagccgggcgtggtagcgggcgcctgtagtcccagctactcgggaggctgaggcaggagaatggcgtgaacccgggaggcggagcttgcagtgagccgagatcgcgccactgcactccagcctgggcgacagagcgagactccgtctcaaaaaaaaaaaaaaaaaaaaaaatacaaaaattagccgggcgtggtggcccacgcctgtaatcccagctactcgggaggctaaggcaggaaaattgtttgaacccaggaggtggaggctgcagtgagctgagattgtgccacttcactccagcctgggtgacaaagtgagactccgtcacaacaacaacaacaaaaagcttccccaactaaagcctagaagagcttctgaggcgctgctttgtcaaaaggaagtctctaggttctgagctctggctttgccttggctttgccagggctctgtgaccaggaaggaagtcagcatgcctctagaggcaaggaggggaggaacactgcactcttaagcttccgccgtctcaacccctcacaggagcttactggcaaacatgaaaaatcggcttaccattaaagttctcaatgcaaccataaaaaaaaaa

SEQ ID NO: 102 - DNA, 2498 bp, HOMO SAPIENS
gtgcgcgtccacagctctcactcaccctccggcttcctgtcggggctttctcagccccaccccacgtttggacatttggagcatttccttccctgacagccggacctgggactgggctggggccctggcggatggagacatgctgcccctgctgctgctgcccctgctgtggggggggtccctgcaggagaagccagtgtacgagctgcaagtgcagaagtcggtgacggtgcaggagggcctgtgcgtccttgtgccctgctccttctcttacccctggagatcctggtattcctctcccccactctacgtctactggttccgggacggggagatcccatactacgctgaggttgtggccacaaacaacccagacagaagagtgaagccagagacccagggccgattccgcctccttggggatgtccagaagaagaactgctccctgagcatcggagatgccagaatggaggacacgggaagctatttcttccgcgtggagagaggaagggatgtaaaatatagctaccaacagaataagctgaacttggaggtgacagccctgatagagaaacccgacatccactttctggagcctctggagtccggccgccccacaaggctgagctgcagccttccaggatcctgtgaagcgggaccacctctcacattctcctggacggggaatgccctcagccccctggaccccgagaccacccgctcctcggagctcaccctcacccccaggcccgaggaccatggcaccaacctcacctgtcagatgaaacgccaaggagctcaggtgaccacggagagaactgtccagctcaatgtctcctatgctccacagaccatcaccatcttcaggaacggcatagccctagagatcctgcaaaacacctcataccttccggtcctggagggccaggctctgcggctgctctgtgatgctcccagcaacccccctgcacacctgagctggttccagggctcccctgccctgaacgccacccccatctccaataccgggatcttggagcttcgtcgagtaaggtctgcagaagaaggaggcttcacctgccgcgctcagcacccgctgggcttcctgcaaatttttctgaatctctcagtttactccctcccacagttgctgggcccctcctgctcctgggaggctgagggtctgcactgcagatgctcctttcgagcccggccggccccctccctgtgctggcggcttgaggagaagccgctggaggggaacagcagccagggctcattcaaggtcaactccagctcagctgggccctgggccaacagctccctgatcctccacggggggctcagctccgacctcaaagtcagctgcaaggcctggaacatctatgggtcccagagcggctctgtcctgctgctgcaagggagatcgaacctcgggacaggagtggttcctgcagcccttggtggtgctggtgtcatggccctgctctgtatctgtctgtgcctcatcttctttttaatagtgaaagcccgcaggaagcaagcagctgggagaccagagaaaatggatgatgaagaccccattatgggtaccatcacctcgggttccaggaagaagccctggccagacagccccggagatcaagcatctcctcctggggatgcccctcccttggaagaacaaaaggagctccattatgcctcccttagtttttctgagatgaagtcgagggagcctaaggaccaggaggccccaagcaccacggagtactcggagatcaagacaagcaagtgaggatttgcccagagttcagtcctggctggaggagccacagcctgtctgggggaaaggacaagtcagggaccacttgctgaagcacgaagagcccttgtggcaatgttaacattaactgatgtttaagtgctccaagcagatggaattagagaggtgggctcaaatctaggccctggcactgtcatcaagcaattcactgcatccctctgtgcctcagtttcccattctgtaaatcagagatcatgcatgctacctcaaaggttgttgtgaacattaaagaaatcaacacatggaaatcaaccaacatgggtcctggaacagggcgttgtgctcagtgctttctggtctctcttccttgaatagaaaggtcctgctggcaagttctctcaaggctggggatgaccaggcacaaaaaacagggcagcaatatgttggtgtcactccccttcccaaaactcttcgaagactccctaggaaagaccagcccctcagcctggcacttggttcatgatgtgggatcttatatccttgccagagtcatatctttgcccacttttacctgcaatccttgcatcatattcctttggctccagtccttcatttatgagacccataggaatccttccaacagccaaagagttgagtctaactctttcctgcccaaacccattcacggccccctggccttagacaatatatcaca

SEQ ID NO: 103 - DNA, 4148 bp, HOMO SAPIENS
atatgtagccttttcattttcatgaaagtgaagtgatttttagaattcttagttgttttctttagaagaacatttctagggaataatacaagaagatttaggaatcattgaagttataaatctttggaatgagcaaactcagaatggtgctacttgaagactctggatctgctgacttcagaagacattttgtcaacttgagtcccttcaccattactgtggtcttacttctcagtgcctgttttgtcaccagttctcttggaggaacagacaaggagctgaggctagtggatggtgaaaacaagtgtagcgggagagtggaagtgaaagtccaggaggagtggggaacggtgtgtaataatggctggagcatggaagcggtctctgtgatttgtaaccagctgggatgtccaactgctatcaaagcccctggatgggctaattccagtgcaggttctggacgcatttggatggatcatgtttcttgtcgtgggaatgagtcagctctttgggattgcaaacatgatggatggggaaagcatagtaactgtactcaccaacaagatgctggagtgacctgctcagatggatccaatttggaaatgaggctgacgcgtggagggaatatgtgttctggaagaatagagatcaaattccaaggacggtggggaacagtgtgtgatgataacttcaacatagatcatgcatctgtcatttgtagacaacttgaatgtggaagtgctgtcagtttctctggttcatctaattttggagaaggctctggaccaatctggtttgatgatcttatatgcaacggaaatgagtcagctctctggaactgcaaacatcaaggatggggaaagcataactgtgatcatgctgaggatgctggagtgatttgctcaaagggagcagatctgagcctgagactggtagatggagtcactgaatgttcaggaagattagaagtgagattccaaggagaatgggggacaatatgtgatgacggctgggacagttacgatgctgctgtggcatgcaagcaactgggatgtccaactgccgtcacagccattggtcgagttaacgccagtaagggatttggacacatctggcttgacagcgtttcttgccagggacatgaacctgctgtctggcaatgtaaacaccatgaatggggaaagcattattgcaatcacaatgaagatgctggcgtgacatgttctgatggatcagatctggagctaagacttagaggtggaggcagccgctgtgctgggacagttgaggtggagattcagagactgttagggaaggtgtgtgacagaggctggggactgaaagaagctgatgtggtttgcaggcagctgggatgtggatctgcactcaaaacatcttatcaagtgtactccaaaatccaggcaacaaacacatggctgtttctaagtagctgtaacggaaatgaaacttctctttgggactgcaagaactggcaatggggtggacttacctgtgatcactatgaagaagccaaaattacctgctcagcccacagggaacccagactggttggaggggacattccctgttctggacgtgttgaagtgaagcatggtgacacgtggggctccatctgtgattcggacttctctctggaagctgccagcgttctatgcagggaattacagtgtggcacagttgtctctatcctggggggagctcactttggagagggaaatggacagatctgggctgaagaattccagtgtgagggacatgagtcccatctttcactctgcccagtagcaccccgcccagaaggaacttgtagccacagcagggatgttggagtagtctgctcaagatacacagaaattcgcttggtgaatggcaagaccccgtgtgagggcagagtggagctcaaaacgcttggtgcctggggatccctctgtaactctcactgggacatagaagatgcccatgttctttgccagcagcttaaatgtggagttgccctttctaccccaggaggagcacgttttggaaaaggaaatggtcagatctggaggcatatgtttcactgcactgggactgagcagcacatgggagattgtcctgtaactgctctaggtgcttcattatgtccttcagagcaagtggcctctgtaatctgctcaggaaaccagtcccaaacactgtcctcgtgcaattcatcgtctttgggcccaacaaggcctaccattccagaagaaagtgctgtggcctgcatagagagtggtcaacttcgcctggtaaatggaggaggtcgctgtgctgggagagtagagatctatcatgagggctcctggggcaccatctgtgatgacagctgggacctgagtgatgcccacgtggtttgcagacagctgggctgtggagaggccattaatgccactggttctgctcattttggggaaggaacagggcccatctggctggatgagatgaaatgcaatggaaaagaatcccgcatttggcagtgccattcacacggctgggggcagcaaaattgcaggcacaaggaggatgcgggagttatctgctcagaattcatgtctctgagactgaccagtgaagccagcagagaggcctgtgcagggcgtctggaagttttttacaatggagcttggggcactgttggcaagagtagcatgtctgaaaccactgtgggtgtggtgtgcaggcagctgggctgtgcagacaaagggaaaatcaaccctgcatctttagacaaggccatgtccattcccatgtgggtggacaatgttcagtgtccaaaaggacctgacacgctgtggcagtgcccatcatctccatgggagaagagactggccagcccctcggaggagacctggatcacatgtgacaacaagataagacttcaggaaggacccacttcctgttctggacgtgtggagatctggcatggaggttcctgggggacagtgtgtgatgactcttgggacttggacgatgctcaggtggtgtgtcaacaacttggctgtggtccagctttgaaagcattcaaagaagcagagtttggtcaggggactggaccgatatggctcaatgaagtgaagtgcaaagggaatgagtcttccttgtgggattgtcctgccagacgctggggccatagtgagtgtgggcacaaggaagacgctgcagtgaattgcacagatatttcagtgcagaaaaccccacaaaaagccacaacaggtcgctcatcccgtcagtcatcctttattgcagtcgggatccttggggttgttctgttggccattttcgtcgcattattcttcttgactaaaaagcgaagacagagacagcggcttgcagtttcctcaagaggagagaacttagtccaccaaattcaataccgggagatgaattcttgcctgaatgcagatgatctggacctaatgaattcctcaggaggccattctgagccacactgaaaaggaaaatgggaatttataacccagtgagttcagcctttaagataccttgatgaagacctggactattgaatggagcagaaattcacctctctcactgactattacagttgcatttttatggagttcttcttctcctaggattcctaagactgctgctgaatttataaaaattaagtttgtgaatgtgactacttagtggtgtatatgagactttcaagggaattaaataaataaataagaatgttattgatttgagtttgctttaattacttgtccttaattctattaatttctaaatgggcttcctaattttttgtagagtttcctagatgtattataatgtgttttatttgacagtgtttcaatttgcatatacagtactgtatattttttcttatttggtttgaataattttcctattaccaaataaaaataaatttatttttactttagtttttctaagacaggaaaagttaatgatattgaagggtctgtaaataatatatggctaactttataaggcatgactcacaacgattctttaactgctttttgttactgtaattctgttcactagaataaaatgcagagccacacctggtgagggcacaaaaaaaaaaaaaaaaaaaaaaaaaaaaaaaaaaaaaaaaa

SEQ ID NO: 104 - DNA, 1848 bp, HOMO SAPIENS
cccgactcttttatagctccctggttcaacctcaaggccttgaggttttggcagctctggaggatgagagagaacatggccaggggcccttgcaacgcgccgagatgggtgtccctgatggtgctcgtcgccataggcaccgccgtgacagcggccgtcaaccctggcgtcgtggtcaggatctcccagaagggcctggactacgccagccagcaggggacggccgctctgcagaaggagctgaagaggatcaagattcctgactactcagacagctttaagatcaagcatcttgggaaggggcattatagcttctacagcatggacatccgtgaattccagcttcccagttcccagataagcatggtgcccaatgtgggccttaagttctccatcagcaacgccaatatcaagatcagcgggaaatggaaggcacaaaagagattcttaaaaatgagcggcaattttgacctgagcatagaaggcatgtccatttcggctgatctgaagctgggcagtaaccccacgtcaggcaagcccaccatcacctgctccagctgcagcagccacatcaacagtgtccacgtgcacatctcaaagagcaaagtggggtggctgatccaactcttccacaaaaaaattgagtctgcgcttcgaaacaagatgaacagccaggtctgcgagaaagtgaccaattctgtatcctccgagctgcaaccttatttccagactctgccagtaatgaccaaaatagattctgtggctggaatcaactatggtctggtggcacctccagcaaccacggctgagaccctggatgtacagatgaagggggagttttacagtgagaaccaccacaatccacctccctttgctccaccagtgatggagtttcccgctgcccatgaccgcatggtatacctgggcctctcagactacttcttcaacacagccgggcttgtataccaagaggctggggtcttgaagatgacccttagagatgacatgattccaaaggagtccaaatttcgactgacaaccaagttctttggaaccttcctacctgaggtggccaagaagtttcccaacatgaagatacagatccatgtctcagcctccaccccgccacacctgtctgtgcagcccaccggccttaccttctaccctgccgtggatgtccaggcctttgccgtcctccccaactcctccctggcttccctcttcctgattggcatgcacacaactggttccatggaggtcagcgccgagtccaacaggcttgttggagagctcaagctggataggctgctcctggaactgaagcactcaaatattggccccttcccggttgaattgctgcaggatatcatgaactacattgtacccattcttgtgctgcccagggttaacgagaaactacagaaaggcttccctctcccgacgccggccagagtccagctctacaacgtagtgcttcagcctcaccagaacttcctgctgttcggtgcagacgttgtctataaatgaaggcaccaggggtgccgggggctgtcagccacacctgttcctgatgggctgtggggcaccggctgcctttccccagggaatcctctccagatcttaaccaagagccccttgcaaacttcttcgactcagattcagaaatgatctaaacacgaggaaacattattcattggaaaagtgcatggtgtgtattttagggattatgagcttctttcaagggctaaggctgcagagatatttcctccaggaatcgtgtttcaattgtaaccaagaaatttccatttgtgcttcatgaaaaaaaacttctggtttttttcatgtgga

SEQ ID NO: 105 - DNA, 1924 bp, HOMO SAPIENS
cgtagctatttcaaggcgcgcgcctcgtggtggactcaccgctagcccgcagcgctcggcttcctggtaattcttcacctcttttctcagctccctgcagcatgggtgctgggccctccttgctgctcgccgccctcctgctgcttctctccggcgacggcgccgtgcgctgcgacacacctgccaactgcacctatcttgacctgctgggcacctgggtcttccaggtgggctccagcggttcccagcgcgatgtcaactgctcggttatgggaccacaagaaaaaaaagtagtggtgtaccttcagaagctggatacagcatatgatgaccttggcaattctggccatttcaccatcatttacaaccaaggctttgagattgtgttgaatgactacaagtggtttgccttttttaagtataaagaagagggcagcaaggtgaccacttactgcaacgagacaatgactgggtgggtgcatgatgtgttgggccggaactgggcttgtttcaccggaaagaaggtgggaactgcctctgagaatgtgtatgtcaacacagcacaccttaagaattctcaggaaaagtattctaataggctctacaagtatgatcacaactttgtgaaagctatcaatgccattcagaagtcttggactgcaactacatacatggaatatgagactcttaccctgggagatatgattaggagaagtggtggccacagtcgaaaaatcccaaggcccaaacctgcaccactgactgctgaaatacagcaaaagattttgcatttgccaacatcttgggactggagaaatgttcatggtatcaattttgtcagtcctgttcgaaaccaagcatcctgtggcagctgctactcatttgcttctatgggtatgctagaagcgagaatccgtatactaaccaacaattctcagaccccaatcctaagccctcaggaggttgtgtcttgtagccagtatgctcaaggctgtgaaggcggcttcccataccttattgcaggaaagtacgcccaagattttgggctggtggaagaagcttgcttcccctacacaggcactgattctccatgcaaaatgaaggaagactgctttcgttattactcctctgagtaccactatgtaggaggtttctatggaggctgcaatgaagccctgatgaagcttgagttggtccatcatgggcccatggcagttgcttttgaagtatatgatgacttcctccactacaaaaaggggatctaccaccacactggtctaagagaccctttcaacccctttgagctgactaatcatgctgttctgcttgtgggctatggcactgactcagcctctgggatggattactggattgttaaaaacagctggggcaccggctggggtgagaatggctacttccggatccgcagaggaactgatgagtgtgcaattgagagcatagcagtggcagccacaccaattcctaaattgtagggtatgccttccagtatttcataatgatctgcatcagttgtaaaggggaattggtatattcacagactgtagactttcagcagcaatctcagaagcttacaaatagatttccatgaagatatttgtcttcagaattaaaactgcccttaattttaatatacctttcaatcggccactggccatttttttctaagtattcaattaagtgggaattttctggaagatggtcagctatgaagtaatagagtttgcttaatcatttgtaattcaaacatgctatattttttaaaatcaatgtgaaaacatagacttatttttaaattgtaccaatcacaagaaaataatggcaataattatcaaaacttttaaaatagatgctcatatttttaaaataaagttttaaaaataactgcaaaaaaaaaaaaaaaaaa

SEQ ID NO: 106 - DNA, 924 bp, HOMO SAPIENS
gcacagcagcaactgactgggcagcctttcaggaaagatgcagccactcctgcttctgctggcctttctcctacccactggggctgaggcaggggagatcatcggaggccgggagagcaggccccactcccgcccctacatggcgtatcttcagatccagagtccagcaggtcagagcagatgtggagggttcctggtgcgagaagactttgtgctgacagcagctcattgctggggaagcaatataaatgtcaccctgggcgcccacaatatccagagacgggaaaacacccagcaacacatcactgcgcgcagagccatccgccaccctcaatataatcagcggaccatccagaatgacatcatgttattgcagctgagcagaagagtcagacggaatcgaaacgtgaacccagtggctctgcctagagcccaggagggactgagacccgggacgctgtgcactgtggccggctggggcagggtcagcatgaggaggggaacagatacactccgagaggtgcagctgagagtgcagagggataggcagtgcctccgcatcttcggttcctacgacccccgaaggcagatttgtgtgggggaccggcgggaacggaaggctgccttcaagggggattccggaggccccctgctgtgtaacaatgtggcccacggcatcgtctcctatggaaagtcgtcaggggttcctccagaagtcttcaccagggtctcaagtttcctgccctggataaggacaacaatgagaagcttcaaactgctggatcagatggagacccccctgtgactgactcttcttctcggggacacaggccagctccacagtgttgccagagccttaataaacgtccacagagtataaataaccaattcctcatttgttcattaaacgtcattcagtactta

SEQ ID NO: 107 - DNA, 4100 bp, HOMO SAPIENS
gtacctcatgtgacaagttccaatttcttttcaagtcaattgaactgaaatctccttgttgctttgaaatcttagaagagagcccactaattcaaggactcttactgtgggagcaactgctggttctatcacaatgaaacggctggtttgtgtgctcttggtgtgctcctctgcagtggcacagttgcataaagatcctaccctggatcaccactggcatctctggaagaaaacctatggcaaacaatacaaggaaaagaatgaagaagcagtacgacgtctcatctgggaaaagaatctaaagtttgtgatgcttcacaacctggagcattcaatgggaatgcactcatacgatctgggcatgaaccacctgggagacatgaccagtgaagaagtgatgtctttgatgagttccctgagagttcccagccagtggcagagaaatatcacatataagtcaaaccctaatcggatattgcctgattctgtggactggagagagaaagggtgtgttactgaagtgaaatatcaaggttcttgtggtgcttgctgggctttcagtgctgtgggggccctggaagcacagctgaagctgaaaacaggaaagctggtgtctctcagtgcccagaacctggtggattgctcaactgaaaaatatggaaacaaaggctgcaatggtggcttcatgacaacggctttccagtacatcattgataacaagggcatcgactcagacgcttcctatccctacaaagccatggatcagaaatgtcaatatgactcaaaatatcgtgctgccacatgttcaaagtacactgaacttccttatggcagagaagatgtcctgaaagaagctgtggccaataaaggcccagtgtctgttggtgtagatgcgcgtcatccttctttcttcctctacagaagtggtgtctactatgaaccatcctgtactcagaatgtgaatcatggtgtacttgtggttggctatggtgatcttaatgggaaagaatactggcttgtgaaaaacagctggggccacaactttggtgaagaaggatatattcggatggcaagaaataaaggaaatcattgtgggattgctagctttccctcttacccagaaatctagaggatctctcctttttataacaaatcaagaaatatgaagcactttctcttaacttaatttttcctgctgtatccagaagaaataattgtgtcatgattaatgtgtatttactgtactaattagaaaatatagtttgaggccgggcacggtggctcacgcctgtaatcccagtacttgggaggccaaggcaggcatatcaacttgaggccaggagttaaagagcagcctggctaacatggtgaaaccccatctctactaaaaatacaaaaaattagccgagcacggtggtgcatgcctgtaatcccagctacttgggaggctgaggcacgagattccttgaacccaagaggttgaggctatgttgagctgagatcacaccactgtactccagcctggatgacagagtggagactctgtttcaaaaaaacagaaaagaaaatatagtttgattcttcatttttttaaatttgcaaatctcaggataaagtttgctaagtaaattagtaatgtactatagatataactgtacaaaaattgttcaacctaaaacaatctgtaattgcttattgttttattgtatactctttgtctttttaagacccctaatagccttttgtaacttgatggcttaaaaatacttaataaatctgccatttcaaatttctatcattgccacataccattcttattcctaggcaactattaataatctatcctgagaatattaattgtggtattctggtgatggggtttagcaactttgatggaagaaaatattaggctataaatgtcctaaggactcagattgtatctttgtacagaagaggattcaaaacgccacgtgtagtggctcatgcctgtaatcccaacactttgggaggctgaagtaggaggatcgtcttgagcccaggagttcaagaccagcctggacaacatagtgagaccttgtctccacaaaaataaaaaagaaactatccaggagtggtggtgtgtgcctgtggtccctgctatgcagatgtctaagacaggaggatcacaagagcccaggaggttgagaatgcagtgagcttgtaattgcaccactgcactccagcctgggtgacagagcaagaccctgtcttaaaaaaagaggattcaacacatatttttatattatgttaaagtaaagaaatgcataaaagacaagcactttggaagaattattttaatgatcaacaatttaatgtattagtccaaattatttttacgtagtcatcaacaatttgaccagggcctttatttggcaaataactgagccaaccagaataaaataaccaatactccactgctcatatttttatctaattcagatggatcttccttacaactgctctagattagtagatgcatctaagcaggcagcaggaactttaaattttttaagttcatgtctatgacatgaacaatgtgtgggataatgtcattaatatatcctaaattaacctaaacgtatttcactaactctggctccttctccataaagcacattttaaggaacaagaattgctaaatataaaaacataaataataccataatacatggctatcatcaaaagtgtatagaatattatagtttaaaagtatttagttgattacttttcagttttgttttgttttttgagacggagtctcactctgttgcccaggctggagtgcagtggcaccatctcagttcactgcaacttctgcctcccgagttcaagcgattctcctgcctcagcctcccgagtagctggaattataggcgtgcaccaccacgcccagctaatttttgtatttttagtaaagacagggttttgccacattagccaggctggtctcaaactcctgacctcaggtgatccacccaccccagcctcccaaagtgctaagattacaggcgtgagccactgagcccagcctacttttcagtttttaacataatttttgttttatccacaacttttcaagtattgaaagtagaataaaaacatgggttcttagtctttagctatctgttaaagcctatgaatgccttcttaaaatcatgtttttaaatgcataaaatatataggattacaaaggaatctaattatatcgaaatacagttattaaaatgttaaaagataagtttgttatatattaatatgcatgcttctttataaatgcattaaataagagttaatagctatcctaaatttgaaatagtgataagcataatgaaaatagatgcaaaaaactaatgtgatatgaaaatatctgggtttttcttttgatgatgaagtattgctaatattaccgtggtttatgaactatgttcagaattgaagaaaatcctaactttcagttagaggttagtgacggggttcaggacaccctacacaaaatacagcactttgacatattgaatattttaagctgaaggcatttgaggaaattgcagaagcaggaaggtgactctgaccttctgcctgctgttctccccagaagcagccataaaacctgggaaggattttctgaccttcccctgaagtagatcataagactgtcatgtaagaggtgctctcctggcacccagagaaaaggagcatccttacctccaaaagcacagggacacaaagaggaatctaaacaaacaggcctctcagtttcccccagtttattacatttagcttgttcacactttgccctatgacatttctacatcactggctgctcttcatcaaacctactataaaaaacattcaagttcaactgtttctttgggcctttatttccttatggagcccctcgtgtcgtgtaaaacttatattaaataaatgtgcatgcttttctcttgctaatctctcttttgttatagagatctcagccctaaacctaggatggatagaaggaaacatatgttctcccctacattagtaaaaataaaaatggaattttttacccatacaaa

SEQ ID NO: 108 - DNA, 690 bp, HOMO SAPIENS
ccgggcgctcctagcggtctcccggcccctgccgccctgccactatgtcccgccgctctatgctgcttgcctgggctcttcccagcctccttcgactcggagcggctcaggagacagaagacccggcctgctgcagccccatagtgccccggaacgagtggaaggccctggcatcagagtgcgcccagcacctgagcctgcccttacgctatgtggtggtatcgcacacggcgggcagcagctgcaacacccccgcctcgtgccagcagcaggcccggaatgtgcagcactaccacatgaagacactgggctggtgcgacgtgggctacaacttcctgattggagaagacgggctcgtatacgagggccgtggctggaacttcacgggtgcccactcaggtcacttatggaaccccatgtccattggcatcagcttcatgggcaactacatggatcgggtgcccacaccccaggccatccgggcagcccagggtctactggcctgcggtgtggctcagggagccctgaggtccaactatgtgctcaaaggacaccgggatgtgcagcgtacactctctccaggcaaccagctctaccacctcatccagaattggccacactaccgctccccctgaggccctgctgatccgcaccccattcctcccctcccatggccaaaaaccccactgt

SEQ ID NO: 109 - DNA, 3033 bp, HOMO SAPIENS
aacacaactggcacatctcttttctcatctcttgaaaaaaaccaacagagaaaaaagtaccttgagaataaaggtaatgattaatctgtcaggcacaaaagggattgttttggggatttcgggttctaagtcgcagattcaaacaaatagcagcgaacagggaatgacagttccaccagaagacgattaagccacagcctctaattggaacggcatttgtacagtcagagactcttaccagacatctccaggaatctgtgagccattgtcaaaacgtccattttcatctggctgtgaaagtgaggaccacaacaggtaggtattggtagaaacaggagtcctcagagaagccccaagatgcagcctgagggagcagaaaagggaaaaagcttcaagcagagactggtcttgaagagcagcttagcgaaagaaaccctctctgagttcttgggcacgttcatcttgattgtccttggatgtggctgtgttgcccaagctattctcagtcgaggacgttttggaggggtcatcactatcaatgttggattttcaatggcagttgcaatggccatttatgtggctggcggtgtctctggtggtcacatcaacccagctgtgtctttagcaatgtgtctctttggacggatgaaatggttcaaattgccattttatgtgggagcccagttcttgggagcctttgtgggggctgcaaccgtctttggcatttactatgatggacttatgtcctttgctggtggaaaactgctgatcgtgggagaaaatgcaacagcacacatttttgcaacatacccagctccgtatctatctctggcgaacgcatttgcagatcaagtggtggccaccatgatactcctcataatcgtctttgccatctttgactccagaaacttgggagcccccagaggcctagagcccattgccatcggcctcctgattattgtcattgcttcctccctgggactgaacagtggctgtgccatgaacccagctcgagacctgagtcccagacttttcactgccttggcaggctgggggtttgaagtcttcagagctggaaacaacttctggtggattcctgtagtgggccctttggttggtgctgtcattggaggcctcatctatgttcttgtcattgaaatccaccatccagagcctgactcagtctttaagacagaacaatctgaggacaaaccagagaaatatgaactcagtgtcatcatgtagtggcatgctcagctctggatttgcagtcagtttgggattctcttcagaaagatggcatctaagtgtctgtgttcttgtaagcctgaggtggaatccacccagttttgtctgctagccatatgggacatctaattggaaaagcatctgcataaaagtttggaaacaatgaccacttctctaccattgtcccccacccccaccccccagaataacgctgactgtcccctgaaacagccttctctcctgccctgtttatttcatcctcgatgggaattcttgctaggtaagcactaataactcggcatcttgacgatagtcccatttgggtggtttcagctgcactatctgtatgaaatggtgtcaccaaaacccttttcttcagtatcgacaaagattacattctgagtaccaaccaaaccctaaattgaaagacaaaactatggtttcagtcaacatattcatgaattagggagctaatgggttaagcttccagttcccgctatgctactggatttgtataaatactgatattctccaaacctagtggtgtagggagcaagagaatgcagctggaaggcacaaggggaggacattgtggcattcagaaactgcaggagacaagatgaatttgagaagccaaatggaatttttaatggaaaccatttatcagattaatctcttgctctcctgcattttagaggacaccaattaatttcctggtctttagtatataataacctaaaataccattgtaacctcagtcatgaaaaatacatcactctgtctttttagctcaaatgtattttcctaattgcccacttgagaacagacatttgacaagttatatcaacgactgtgcttgtccattattttacacatgccctagaagccaaaactgaaagccactggatcctggtctagctgaatcttcagagtgggaggtctccaaaaagatattaccttattgggcttaacaattcacaaggcactttcacacccattatctaatttaatcctcataatgactatgtgaggcaaatgccacattgcccatttttcagataaagaaacaaaatcttagggaagataagttgagttgtccaagagcacactgaaagttgaatgttatctaatgcattcctctacctttcagaagatcagtagctggctgagaatctttgccaaatcttccttgctagccagaagtggaattggcagcttctagaatatgtacacctctggacaaaatgttcctcaatcttaagatacaaagaccctcattgtctgggtctattcccacacttactgagtacagatgaaggaaagtggtagcaatttaatcataactttcatttgctgaaaaacattatgagaaggcctcccttcctaagccacctctggtcttgctaagtcttgatcttgcttcctgccagcaccaaacattacattcaggggatttcctctggctcagtcttttccccttgaagttctctaatagatgttacttttgacaaaagatcgcctatgagttacaagcaccaggggatgctctacatcaagggatgcaccttcagtcaaactgtcaaaaagcccagaattcccaaaggcattaggtttcccaactgctttgtgctgatatcagaacagcagaaattaaatgtgaaatgtttctgatgacttatgttctacaatctatggacatacgggatttttttttcttgctttgaagctacctggatatttcctatttgaaataaaattgttcggtcattgttgaaaaaaaaaaaa

SEQ ID NO: 110 - DNA, 2755 bp, HOMO SAPIENS
attaaagatgatttttacagtcaatgagccacgtcagggagcgatggcacccgcaggcggtatcaactgatgcaagtgttcaagcgaatctcaactcgttttttccggtgactcattcccggccctgcttggcagcgctgcaccctttaacttaaacctcggccggccgcccgccgggggcacagagtgtgcgccgggccgcgcggcaattggtccccgcgccgacctccgcccgcgagcgccgccgcttcccttccccgccccgcgtccctccccctcggccccgcgcgtcgcctgtcctccgagccagtcgctgacagccgcggcgccgcgagcttctcctctcctcacgaccgaggcagagcagtcattatggcgaaccttggctgctggatgctggttctctttgtggccacatggagtgacctgggcctctgcaagaagcgcccgaagcctggaggatggaacactgggggcagccgatacccggggcagggcagccctggaggcaaccgctacccacctcagggcggtggtggctgggggcagcctcatggtggtggctgggggcagcctcatggtggtggctgggggcagccccatggtggtggctggggacagcctcatggtggtggctggggtcaaggaggtggcacccacagtcagtggaacaagccgagtaagccaaaaaccaacatgaagcacatggctggtgctgcagcagctggggcagtggtggggggccttggcggctacatgctgggaagtgccatgagcaggcccatcatacatttcggcagtgactatgaggaccgttactatcgtgaaaacatgcaccgttaccccaaccaagtgtactacaggcccatggatgagtacagcaaccagaacaactttgtgcacgactgcgtcaatatcacaatcaagcagcacacggtcaccacaaccaccaagggggagaacttcaccgagaccgacgttaagatgatggagcgcgtggttgagcagatgtgtatcacccagtacgagagggaatctcaggcctattaccagagaggatcgagcatggtcctcttctcctctccacctgtgatcctcctgatctctttcctcatcttcctgatagtgggatgaggaaggtcttcctgttttcaccatctttctaatctttttccagcttgagggaggcggtatccacctgcagcccttttagtggtggtgtctcactctttcttctctctttgtcccggataggctaatcaatacccttggcactgatgggcactggaaaacatagagtagacctgagatgctggtcaagccccctttgattgagttcatcatgagccgttgctaatgccaggccagtaaaagtataacagcaaataaccattggttaatctggacttatttttggacttagtgcaacaggttgaggctaaaacaaatctcagaacagtctgaaatacctttgcctggatacctctggctccttcagcagctagagctcagtatactaatgccctatcttagtagagatttcatagctatttagagatattttccattttaagaaaacccgacaacatttctgccaggtttgttaggaggccacatgatacttattcaaaaaaatcctagagattcttagctcttgggatgcaggctcagcccgctggagcatgagctctgtgtgtaccgagaactggggtgatgttttacttttcacagtatgggctacacagcagctgttcaacaagagtaaatattgtcacaacactgaacctctggctagaggacatattcacagtgaacataactgtaacatatatgaaaggcttctgggacttgaaatcaaatgtttgggaatggtgcccttggaggcaacctcccattttagatgtttaaaggaccctatatgtggcattcctttctttaaactataggtaattaaggcagctgaaaagtaaattgccttctagacactgaaggcaaatctcctttgtccatttacctggaaaccagaatgattttgacatacaggagagctgcagttgtgaaagcaccatcatcatagaggatgatgtaattaaaaaatggtcagtgtgcaaagaaaagaactgcttgcatttctttatttctgtctcataattgtcaaaaaccagaattaggtcaagttcatagtttctgtaattggcttttgaatcaaagaatagggagacaatctaaaaaatatcttaggttggagatgacagaaatatgattgatttgaagtggaaaaagaaattctgttaatgttaattaaagtaaaattattccctgaattgtttgatattgtcacctagcagatatgtattacttttctgcaatgttattattggcttgcactttgtgagtattctatgtaaaaatatatatgtatataaaatatatattgcataggacagacttaggagttttgtttagagcagttaacatctgaagtgtctaatgcattaacttttgtaaggtactgaatacttaatatgtgggaaacccttttgcgtggtccttaggcttacaatgtgcactgaatcgtttcatgtaagaatccaaagtggacaccattaacaggtctttgaaatatgcatgtactttatattttctatatttgtaactttgcatgttcttgttttgttatataaaaaaattgtaaatgtttaatatctgactgaaattaaacgagcgaagatgagcaccaaaaaaaaaaaaaaaa

SEQ ID NO: 111 - DNA, 6162 bp, HOMO SAPIENS
cctcttttttgtcttccatagcttgtgagaaaataatttctgagcatttttacttttaaagccatctcgtccctacgaggtttgcgcctctgggcatgtagtctacacaggacctgagaatctgagaaactgcagccgcacggttgtttatggagctttgggcgggggctgagcccgcggtcgtgcccccagcccgctgcccaggccatgccgccccatctgcgcgcggagccgcggctgccgggcctccggggctgagccgggagcgccgggaggaggaggcgccggcggcggagcaggagcgggagccgcggcggcgggcagcgcgggacccagtactatggctgtgtactgctatgcgctcaatagcctggtgatcatgaatagcgccaacgagatgaagagcggcggcggcccggggcccagtggcagcgagacgcccccgcccccgaggagggcagtgctgagccccggcagcgttttcagccccgggagaggcgcctctttcctcttccccccagccgagtcgctgtcccccgaggagccccggagccccgggggctggcggagcggccggcgcaggctgaatagtagcagcggcagtggcagcggcagcagcggcagtagcgtgagcagcccaagttgggctggtcgcctgcgaggggaccggcagcaggtggtggcagccggtaccctctccccgccagggccggaggaggccaagaggaagctgcggatcttgcagcgcgagttgcagaacgtgcaggtgaaccagaaagtgggcatgtttgaggcgcacatccaggcacagagctccgccattcaagcgccccgcagcccgcgtttgggcagggctcgctcgccctccccgtgccccttccgcagcagcagtcagccccctggaagggtcctggttcagggcgcccggagcgaggaacggaggacaaagtcctggggggagcaatgtccagagacttcaggaaccgactccgggaggaaaggagggcccagcctatgctcctcgcaggtgaagaaaggaatgccacctcttcccggccgggctgcccctacaggatcagaggctcagggtccatccgcttttgtaaggatggagaagggtatccctgccagtccccgctgtggctcacccacagctatggaaattgacaaaaggggctctcctaccccgggaactcggagctgcctagctccctcattggggctgttcggagctagcttaacgatggccacggaagtggcagcgagagttacatccactgggccacaccgtccacaggatcttgccctcactgagccgtctgggagagcccgtgagcttgaggacctgcagcccccagaggccctggtggagaggcaggggcagtttctgggcagtgagacaagcccagccccagaaaggggcgggccccgcgatggagaaccccctgggaagatggggaaaggatatctgccctgtggcatgccgggctctggggagcctgaagtgggcaaaaggccagaggagacgactgtgagcgtgcaaagcgcagagtcctctgattccctgagctggtccaggctgcccagggccctggcctccgtaggccctgaggaggcccgaagtggggcccccgtgggcggggggcgttggcagctctccgacagagtggagggagggtccccaacgctgggcttgcttgggggcagcccctcagcacagccggggaccgggaatgtggaggcgggaattccttctggcagaatgctggagcctttgccctgttgggacgctgcgaaagatctgaaagaacctcagtgccctcctggggacagggtgggtgtgcagcctgggaactccagggtttggcagggcaccatggagaaagccggtttggcttggacgcgtggcacaggggtgcaatcagaggggacttgggaaagccagcggcaggacagtgatgccctcccaagtccggagctgctaccccaagatccggacaagcctttcctgaggaaggcctgcagccccagcaacatacctgctgtcatcattacagacatgggcacccaggaggatggggccttggaggagacgcagggaagccctcggggcaacctgcccctgaggaaactgtcctcttcctcggcctcctccacgggcttctcctcatcctacgaagactcagaggaggacatctccagtgaccctgagcgcaccctggaccccaactcagccttcctgcataccctggaccagcagaaacctagagtgagcaaatcatggaggaagataaaaaacatggtgcactggtctcccttcgtcatgtccttcaagaagaagtacccctggatccagctggcaggacacgcagggagtttcaaggcagctgccaatggcaggatcctgaagaagcactgtgagtcagagcagcgctgcctggaccggctgatggtggatgtgctgaggcccttcgtacctgcctaccatggggatgtggtgaaggacggggagcgctacaaccagatggacgacctgctggccgacttcgactcgccctgtgtgatggactgcaagatgggaatcaggacctacctggaggaggagctcacgaaggcccggaagaagcccagcctgcggaaggacatgtaccagaagatgatcgaggtggaccccgaggcccccaccgaggaggaaaaagcacagcgggctgtgaccaagccacggtacatgcagtggcgggagaccatcagctccacggccaccctggggttcaggatcgagggaatcaagaaagaagacggcaccgtgaaccgggacttcaagaagaccaaaacgagggagcaggtcaccgaggccttcagagagttcactaaaggaaaccataacatcctgatcgcctatcgggaccggctgaaggccattcgaaccactctagaagtttctcccttcttcaagtgccacgaggtcattggcagctccctcctcttcatccacgacaagaaggaacaggccaaagtgtggatgatcgactttgggaaaaccacgcccctgcctgagggccagaccctgcagcatgacgtcccctggcaggaggggaaccgggaggatggctacctctcggggctcaataacctcgtcgacatcctgaccgagatgtcccaggatgccccactcgcctgagctgcccacgccctccctggcccccgcctgggcctcctttcctcctcctgtgcttcctttctcgttcctaacttttccttcacttacacctgactgaccctcctgaactgcactacaagacactttgtagaagaggagatgagagtttctagtcattttcctaacttcagggcttggaggtggtgtttgcactgctttttgtagagagggtcacctactagaagagaaatgcccagtcttagaggtgggtcaggtgtagagctggagggggtccctggctgctgaggggaccctaccagatgagccctgcctctgggagccccctaggaagcaccagcctggacctaccacctgcggaggcctgctgccccctggcggccagtgctgttagagtgctgccaagcacagccttatttctgccggggcctccccaccggagagcccagggggccggccgggttcctggtccctggctgggagcagggctttctggtagttggggcacaaaaccatcggggaaccacatgttgactgtgagcaaagtgtcttccgattagcagcctcagggatgccctggtggcctctccagggctgctcaggcaaggccccccacccatctggtatggaaacctgccggctccaggccagacccaggagccaagagaaggctgaagccagcttggctgtgttctctgatctaggccttcccagaggaggcgagcagaagctgtgccacttggaattgcaacccatgagttcagaaggcacactctgccatgctgagctccaagggtgctaccaggggaagatgggatctatagagtctctgggccctggccccagggaggagcacatttttcttgaccctcacctacctggtgctagttggtcaaccctgcctgcatacatgggctcctgtcatggggcccagagtcccttgcagatatagaaataggggaggagctcaggtctgcgccaggcaggaagaaggcaggcttctggcttccagaggtgccgcggtggcctcctggcatcatttgttattgcctctgaaacaagccttactgcctggagggcttagattcctgcttctccaatgtagtgtgggtatcttgtagggtatgtggtggatgccagggcgtgctccaggcacctcttcctgaagtctctgcatttggagattcgtggagaacctatttaagcccaattttaactgaaagccagtgagtctgatatggaagggaatgtaaaatttgcctgacttcttaagaacaaaacccccagctctgtgccccatgctccttggggcttgccacccactcctttgctgtcagaggtacaggagctgggagagtccaggagctagggacacagagggagactatggaccaaggtgtgtgtgtctggaggaaccactgcccaccccaccaccccggggtctctggggaactgtcaacctgcccacgggacatgtacatttccccttttgtgctggaagtgtgagtgacacttgctgggggtggagggtgggacacatgaggatgtataagtacagattttaaaaaaggaaatcaacttacacttcctggctcttgtttaaaacagtggtgagctcctgtgtgggccgacttgctaaaggtcacacacgcgcccggtggagcacgagagacctcgtggcagcatgtgatctggaaggcaggcaggacgggggcgttggggagccaaagtcaactctgggcctctggagctatagtgacttttgggctagaagggaccctggtggtctgtgcttcagccatttgcagggcaggggcatcattaattcagacgtaaagattctatgaatatggactggccaaaagttatccttactccatctgtgaaagaagtttgctaaagcaaatcatgatatgaacaaaaattacaggggacctgtttaagagaacaaaatgttccaagcactttaggcagacaccagctgtttgcaaacaatgtgctaatatgcaaatgatgtgcttattaaaggaggcccatggggcctcttattggcaatacttggctgtgggttacattaaatatgtgaacatagtatgaagtagcatcattttagggttattctgttacttagggtttttgttttctgttttttttttctctttttttgtatttaccgtgctagttctcttctacacctactctgtctctcaagccattttgccactcgcttccctgccatctggcccttccctttgtctcagtgggatagatggattgtgaaatggaatctcccagaacccctgccctggcagcctggaagaccgtgcctgcccagccctcgtcaccacagggactccttgggtcctggcagtgcatgtgccagcaggcaggacaaactctgtgtacctgtgcccaggtgaatgggcgcagggtcctcttgccctgtcctgcggggggccccacgagttcctggcattcagcactgcttagcattctcggaaggtttcttcaactgcttgcttttcccaggcttgcctttagtgtcatgtaagacatttttaagttatatttattttgttgggttttaaaattgcacagaacactaagaccgaaaggctggactcttgtttctccttgaaagctttgcctttgttttgaacttcctttcccacttggtagaaagagcccagaagcagccctggccctgtaagatggactctttcatccttcagttgtatttagctttgagtttctctgcatctgtccaccccatgtgtatataacccagcccctggctctggggtggtcacctcgtcagtgccttttgttctggaggagaggaccccccccgcctgccgagaggctctcttcctgttctgcacccctctccccatgggaccttggagaaaactgaactgttacaaacccctgcacagtgcctgtcaaacagatgcaaaccttcctgaataaagccttggagacca

SEQ ID NO: 112 - DNA, 1863 bp, HOMO SAPIENS
gtctgcccgccgccgccactgctgctgccaccgccgtcgccgccgccgccgccgccgccgctgctgctgccggtgctaaggagttcgctggagccctttcctcagacccggcccggtcttcgcgcccggactcctggcgccagcgctaggcgcactcaccgctctgacgggtgcagacgcgggagttgtcccagactgtggagtggcgggcacggccccagccccccttcccttccctgaccccttcttgccatcgccccagacatggggaacgcggcgaccgccaagaaaggcagcgaggtggagagcgtgaaagagtttctagccaaagccaaagaagactttttgaaaaaatgggagaatccaactcagaataatgccggacttgaagattttgaaaggaaaaaaacccttggaacaggttcatttggaagagtcatgttggtaaaacacaaagccactgaacagtattatgccatgaagatcttagataagcagaaggttgttaaactgaagcaaatagagcatactttgaatgagaaaagaatattacaggcagtgaattttcctttccttgttcgactggagtatgcttttaaggataattctaatttatacatggttatggaatatgtccctgggggtgaaatgttttcacatctaagaagaattggaaggttcagtgagccccatgcacggttctatgcagctcagatagtgctaacattcgagtacctccattcactagacctcatctacagagatctaaaacctgaaaatctcttaattgaccatcaaggctatatccaggtcacagactttgggtttgccaaaagagttaaaggcagaacttggacattatgtggaactccagagtatttggctccagaaataattctcagcaagggctacaataaggcagtggattggtgggcattaggagtgctaatctatgaaatggcagctggctatcccccattctttgcagaccaaccaattcagatttatgaaaagattgtttctggaaagaacttttgatatgaacaaaacaaaactttgagaaaaattaacagacaaggcagtgatttatttttgaagaatttgagaagtgtagactctcaagaggactaaaggtcatatgaagaatgatgagagaaccaaaatacattaaaatcacaaatggaagaagaatattttactaatacaaaaactaagaatgtaaatgttataataattgtttcaaatcatttaattgacagtaattataaagttcttgaatctttactatattacttttatttatattcatataagaaatccaattttctaacaaggatactgtcataactaaatttacatttattaagaaaaactgctttagttaaaattaatgtgtcttcatttttatgcattggcctcgatttgccaatcattctctattggttaaattttatattcagctgtttatgaatatatattcattttatatcaaactttaaaattttgtatctaataatcagcatatattctaaaatcataacagtctaaatcctgggcaccttagaagaatgacaccagaaaaccttattatatcacaatattctgttttccccttcatttatttagaaatatgacaggatatttggtgtacttttgttttttaactaaaagtaccagattatctctccccatgtgggatataaaattatccccatctcttactccctttactcatctaaagtagaagtcatgaaagtggaatttttgccattaaaaggctctgtattatgtgaagttagattgtattaaccatttcccaataaatcatctgtttcaaaactcaaaaaaaaaaaaaaaaaaaaa

SEQ ID NO: 113 - DNA, 8787 bp, HOMO SAPIENS
ggccgcagctccccggcggaggcaagaggtggttgggggggaccatggctgacgttttcccgggcaacgactccacggcgtctcaggacgtggccaaccgcttcgcccgcaaaggggcgctgaggcagaagaacgtgcacgaggtgaaggaccacaaattcatcgcgcgcttcttcaagcagcccaccttctgcagccactgcaccgacttcatctgggggtttgggaaacaaggcttccagtgccaagtttgctgttttgtggtccacaagaggtgccatgaatttgttactttttcttgtccgggtgcggataagggacccgacactgatgaccccaggagcaagcacaagttcaaaatccacacttacggaagccccaccttctgcgatcactgtgggtcactgctctatggacttatccatcaagggatgaaatgtgacacctgcgatatgaacgttcacaagcaatgcgtcatcaatgtccccagcctctgcggaatggatcacactgagaagagggggcggatttacctaaaggctgaggttgctgatgaaaagctccatgtcacagtacgagatgcaaaaaatctaatccctatggatccaaacgggctttcagatccttatgtgaagctgaaacttattcctgatcccaagaatgaaagcaagcaaaaaaccaaaaccatccgctccacactaaatccgcagtggaatgagtcctttacattcaaattgaaaccttcagacaaagaccgacgactgtctgtagaaatctgggactgggatcgaacaacaaggaatgacttcatgggatccctttcctttggagtttcggagctgatgaagatgccggccagtggatggtacaagttgcttaaccaagaagaaggtgagtactacaacgtacccattccggaaggggacgaggaaggaaacatggaactcaggcagaaattcgagaaagccaaacttggccctgctggcaacaaagtcatcagtccctctgaagacaggaaacaaccttccaacaaccttgaccgagtgaaactcacggacttcaatttcctcatggtgttgggaaaggggagttttggaaaggtgatgcttgccgacaggaagggcacagaagaactgtatgcaatcaaaatcctgaagaaggatgtggtgattcaggatgatgacgtggagtgcaccatggtagaaaagcgagtcttggccctgcttgacaaacccccgttcttgacgcagctgcactcctgcttccagacagtggatcggctgtacttcgtcatggaatatgtcaacggtggggacctcatgtaccacattcagcaagtaggaaaatttaaggaaccacaagcagtattctatgcggcagagatttccatcggattgttctttcttcataaaagaggaatcatttatagggatctgaagttagataacgtcatgttggattcagaaggacatatcaaaattgctgactttgggatgtgcaaggaacacatgatggatggagtcacgaccaggaccttctgtgggactccagattatatcgccccagagataatcgcttatcagccgtatggaaaatctgtggactggtgggcctatggcgtcctgttgtatgaaatgcttgccgggcagcctccatttgatggtgaagatgaagacgagctatttcagtctatcatggagcacaacgtttcctatccaaaatccttgtccaaggaggctgtttctatctgcaaaggactgatgaccaaacacccagccaagcggctgggctgtgggcctgagggggagagggacgtgagagagcatgccttcttccggaggatcgactgggaaaaactggagaacagggagatccagccaccattcaagcccaaagtgtgtggcaaaggagcagagaactttgacaagttcttcacacgaggacagcccgtcttaacaccacctgatcagctggttattgctaacatagaccagtctgattttgaagggttctcgtatgtcaacccccagtttgtgcaccccatcttacagagtgcagtatgaaactcaccagcgagaacaaacacctccccagcccccagccctccccgcagtgggaagtgaatccttaaccctaaaattttaaggccacggccttgtgtctgattccatatggaggcctgaaaattgtagggttattagtccaaatgtgatcaactgttcagggtctctctcttacaaccaagaacattatcttagtggaagatggtacgtcatgctcagtgtccagtttaattctgtagaagttacgtctggctctaggttaacccttcctagaaagcaagcagactgttgccccattttgggtacaatttgatatactttccataccctccatctgtggatttttcagcattggaatcccccaaccagagatgttaaagtgagcctgtcccaggaaacatctccacccaagacgtctttggaatccaagaacaggaagccaagagagtgagcagggagggattgggggtgggggaggcctcaaaataccgactgcgtccattctctgcctccatggaaacagcccctagaatctgaaaggccgggataaacctaatcactgttcccaaacattgacaaatcctaacccaaccatggtccagcagttaccagtttaaacaaaaaaacctcagatgagtgttgggtgaatctgtcatctggtaccctccttggttgataactgtcttgatacttttcattctttgtaagaggccaaatcgtctaaggacgttgctgaacaagcgtgtgaaatcatttcagatcaaggataagccagtgtgtacatatgttcattttaatctctgggagattatttttccatccagggtgccatcagtaatcatgccactactcaccagtgttgttcgccaacacccacccccacacacaccaacattttgctgcctaccttgttatccttctcaagaagctgaagtgtacgccctctccccttttgtgcttatttatttaataggctgcagtgtcgcttatgaaagtacgatgtacagtaacttaatggaagtgctgactctagcatcagcctctaccgattgattttcctcccttctctagccctggatgtccacttagggataaaaagaatatggttttggttcccatttctagttcacgttgaatgacaggcctggagctgtagaatcaggaaacccggatgcctaacagctcaaagatgttttgttaatagaaggattttaatacgttttgcaaatgcatcatgcaatgaattttgcatgtttataataaaccttaataacaagtgaatctatattattgatataatcgtatcaagtataaagagagtattataataattttataagacacaattgtgctctatttgtgcaggttcttgtttctaatcctcttttctaattaagttttagctgaatcccttgcttctgtgctttccctccctgcacatgggcactgtatcagatagattactttttaaatgtagataaaatttcaaaaatgaatggctagtttacgtgatagattaggctcttactacatatgtgtgtgtatatatatgtatttgattctacctgcaaacaaatttttattggtgaggactatttttgagctgacactccctcttagtttcttcatgtcacctttcgtcctggttcctccgccactcttcctcttggggacaacaggaagtgtctgattccagtctgcctagtacgttggtacacacgtggcattgccgcagcacctgggctgacctttgtgtgtgcgtgtgtgtgtgtttccttcttcccttcagcctgtgactgttgctgactccaggggtgggagggatggggagactcccctcttgctgtgtgtactggacacgcaggaagcatgctgtcttgctgcctctgcaacgacctgtcgtttgctccagcatgcacaaacttcgtgagaccaacacagccgtgccctgcaggcaccagcacgtgcttttcagaggctgcggactttcttccagccattgtggcattggcctttccagtcttgggaggagcgcgctgctttggtgagacacccccatgcaaggtcctcagagtagccgggttctaccacaaacagaaacagaatgaaagtagctgtcagtccttgtagagagccgctctgtttcctcccagaagcatctcccagctaagctcgcattatttttctcctctggctgtttgcctgaagttcacagaacacacaaccatgaaaggctttttgaggtgagaggcccaggtggtcctggcaaccctgagtagaaggagagacggggtagggaacgggcccggccagaaaagaaccatttcttctgccatcttttatgcaccatagacatcgagactccagggggtcctggctcccctgtccctgcagccctgcaggtcagtgcatgatctgggttcgtgtcctgaccaggtgctcctcctttgatccgaggggaaagggactggtttatagaaagagcctaggagacaaaagggccagtccccctgcccagaatggagcagcagcaggacagacccccacgaggccccccagagaggaggaagatcccacggaggaacacatgaggttagggacccttgttcagcaccccaaacagcctgcctgtttaaagcaggcagcaggcttaggccttccctgcaaccccaacacccacaagtttgtttctctaggaaacacattcactgtctcagctggctgttactctctcagaccatatggcaaagttttccaagaaaatgccccgacaggggtgcccagcacactgcctgagggacaacagacatcagaacaaacccccagagagaaacagtcaaaatcagggcccggtgcagtgttgtcatgtggaacctgctttatccattgctgagtgttgaatgtgggtaatggttagggctttccagatctcagcagccaaagacagttattgttggaagactgtcatgtagataaccatgagcaatggctcgcctcagaatcagttcataaaattctatggtactggccccttcgtgggtattgtgtgaaatgagatggtggcgaggggtgcgctgtggaactgccgcagccacgcaggaggtccctgggggatgctttgggaagtccttgcccctgagcactgcctgattgccagggcctgtggaggtctaggccgcctggcagaatctagcaccgtccgaatccccgcaggacccatggagctatgaccacaccaggccattcaaatggctctgcattatcttcccttggaaggtggccactcctcggtggcagggcctttccctgaggctgcaggccgtgggctggcagcccgtctcttggcatttcaattgaaggtcaccaggtgctgggtttgaaaggaagtcactggagtgctgccaggggccgccctccaaggttaatgagaggcccacatccaggcaagaactaattcaaaaggcagatcagaaaccacaggagtcaaaattattgctccggcagtgcttcccttcctttcatccactggcctcgtgtggtccatgcagggccactgtctgccctttctgatgccacgtattaggctttcttactcagaattttgatagaaaaccatggggccaagagctctggaagcctggccggaaagaccaaggttcatgcagcccaacaaatgattgttgagcacctctcggagccaaagtccttaggcgagtgtggtgacttcctggaaggaggatgcagacttccagagagcccccccaacggacgtgctgagaagggagagggaggcgggggctgtagtcaggaaggagccagagaagaacagggtttgggtgcatccagaaatatgcctgcagtaggagggagaggaaggggtgccaccgtcaacggcttcccatcggaggtggttggtgcagatggaagtttctgtctgctggccctcaagagagtgttttgccagggacacagtctgttcctcctcagaaaacaccccccaaatgctaacaacatccccaccagctgctagaagcccctttcccctccccaccttgaagtagctcatagttctctgggcagagccagaccatccagtgtaccccagaggccagtaggttcctgcccattttcctctctggcttcctgccaagaattatggcagctgaggatgaatggagaagtaaaaacaactaacaccgcacaactaacaactaacaccgcagttcccacctgggttccacttagcaggagacatttcggagggttttttttgtttttgttcctgttttttttttttttgctggaatttgttttctcagtactgaaaagagaaaaagtgacaatcttgtatttttaaaagcctcggaaaggtgataccatctgacagtcattttctcacgttggtcttctaaagtcacctatttcttgtgtgtgcacatcacaccatttcctgtttctttataacccgacaagggtaggagtgcctgtttcccctgctgggcacaccagacaatcgtaatcacaaaacagacactgagccaggggcccaaagggtgtgatcatgagagttaccgggacagcagtaggcatgacagtcaccaggaaggacaagggtgctctgttgttagtggccacacaccaatttgacaaggagtgttgcgaaatttttatttatttatttatttattttgagatggagtttcactcttgttgcccaggctggagtgcggtggtacaatctcggctcactgcaacctccacctcccaggttcaagcgattctcctgcctcagcctcccaagtacctgggactacaggtgcgtgccaccacacccagctaaattttgtgtttttagtagagatggggtttcaccatgttggccaggatggtcttgaacccctgacctcatgatctgcctgcctcggcctcccaaagtgctgggattacaggcatgagccaccacgcccagccaaaatatttttttaaagtcattttccttaagctgcttgggctacatgtgaaatacactggacggtcaacattcctgtctcctcccatttgggctgatgcagcagatccagggaatgttacctgtttctgctgctagaagatccaggaaattgggaaggttacctgacgcacacatggatgaaggccatcatctagaaatggggtcaaccacaattgtgttaattccgtagtgtcagggattcttcgggaaggtcaacagtatgaaggattctgacccctgtgcctcccatttatgtgatcaggtgacagttaataaccgtggaggtcacactcagccatccaacagccttacagtgaccctacacaaaagcccccaaattccaaagactttttcttaacctaaaggaagaaattatttgttaattccagtagagcaactgaatatactgggctatttgtacttttttatagagaactttaataataattctttaaaaatgagtttttagaacaaagcaactgacgatttcctaagattccaatgccctggagcttgtaggaggacttagcctgggtcagctggagcacccccgacctgatctcccactgccagattttcccatgctcctagggtatggagtccacgtgggaatgactgcaagttcaggtggaacttggccgactgatgctctgcgagtttttaatagacactggggacaactgcttaaggtttagaaacttccaaaccacaggaaagacatttttagtgtcccccatccagaggcagccctggaataggattcccaggggtttctgggacccctttccttgctccgtgaggctctgtggccatcttttggcaggaggaggatgcttccttggctctgtgcccagacccgcctggtccccaggtctctcaccttgggtgaagattcagagatgccctgtaaggattttgcccactgggcaactcagaaatacttcgatctcccaagatataagaggcagcagcaaacgtgcctattgacgtctgtttcatagttaccacttacgcgagtagacagaactcggcttttcagaaaataggtgtcaagtccactttataagaacctttttttctaaaataagataaaaggtggctttgcattttctgattaaacgactgtgtctttgtcacctctgcttaactttaggagtatccattcctgtgattgtagacttttgttgatattcttcctggaagaatatcattcttttcttgaagggttggtttactagaatattcaaaatcaatcatgaaggcagttactattttgagtctaaaggttttctaaaaattaacctcacatcccttctgttagggtctttcagaatatcttttataaacagaagcatttgaagtcattgcttttgctacatgatttgtgtgtgtgaaggacataccacgtttaaatcattaattgaaaaacatcatataagccccaactttgtttggaggaagagacggaggttgaggtttttccttctgtataagcacctactgacaaaatgtagaggccattcaaccgtcaaacaccatttggttatatcgcagaggagacggatgtgtaaattactgcattgctttttttttcagtttgtataacctctaatctccgtttgcatgatacgctttgttagaaacattaattgtagtttggaagcaagtgtgtatgaataaagataatgatcattccaaaaaaaaaaaaaaaaa

SEQ ID NO: 114 - DNA, 2711 bp, HOMO SAPIENS
agctggacgagcggcagcagctgggcgagtgacagccccggctccgcgcgccgcggccgccagagccggcgcaggggaagcgcccgcggccccgggtgcagcagcggccgccgcctcccgcgcctccccggcccgcagcccgcggtcccgcggccccggggccggcacctctcgggctccggctccccgcgcgcaagatggctgacccggctgcggggccgccgccgagcgagggcgaggagagcaccgtgcgcttcgcccgcaaaggcgccctccggcagaagaacgtgcatgaggtcaagaaccacaaattcaccgcccgcttcttcaagcagcccaccttctgcagccactgcaccgacttcatctggggcttcgggaagcagggattccagtgccaagtttgctgctttgtggtgcacaagcggtgccatgaatttgtcacattctcctgccctggcgctgacaagggtccagcctccgatgacccccgcagcaaacacaagtttaagatccacacgtactccagccccacgttttgtgaccactgtgggtcactgctgtatggactcatccaccaggggatgaaatgtgacacctgcatgatgaatgtgcacaagcgctgcgtgatgaatgttcccagcctgtgtggcacggaccacacggagcgccgcggccgcatctacatccaggcccacatcgacagggacgtcctcattgtcctcgtaagagatgctaaaaaccttgtacctatggaccccaatggcctgtcagatccctacgtaaaactgaaactgattcccgatcccaaaagtgagagcaaacagaagaccaaaaccatcaaatgctccctcaaccctgagtggaatgagacatttagatttcagctgaaagaatcggacaaagacagaagactgtcagtagagatttgggattgggatttgaccagcaggaatgacttcatgggatctttgtcctttgggatttctgaacttcagaaagccagtgttgatggctggtttaagttactgagccaggaggaaggcgagtacttcaatgtgcctgtgccaccagaaggaagtgaggccaatgaagaactgcggcagaaatttgagagggccaagatcagtcagggaaccaaggtcccggaagaaaagacgaccaacactgtctccaaatttgacaacaatggcaacagagaccggatgaaactgaccgattttaacttcctaatggtgctggggaaaggcagctttggcaaggtcatgctttcagaacgaaaaggcacagatgagctctatgctgtgaagatcctgaagaaggacgttgtgatccaagatgatgacgtggagtgcactatggtggagaagcgggtgttggccctgcctgggaagccgcccttcctgacccagctccactcctgcttccagaccatggaccgcctgtactttgtgatggagtacgtgaatgggggcgacctcatgtatcacatccagcaagtcggccggttcaaggagccccatgctgtattttacgctgcagaaattgccatcggtctgttcttcttacagagtaagggcatcatttaccgtgacctaaaacttgacaacgtgatgctcgattctgagggacacatcaagattgccgattttggcatgtgtaaggaaaacatctgggatggggtgacaaccaagacattctgtggcactccagactacatcgcccccgagataattgcttatcagccctatgggaagtccgtggattggtgggcatttggagtcctgctgtatgaaatgttggctgggcaggcaccctttgaaggggaggatgaagatgaactcttccaatccatcatggaacacaacgtagcctatcccaagtctatgtccaaggaagctgtggccatctgcaaagggctgatgaccaaacacccaggcaaacgtctgggttgtggacctgaaggcgaacgtgatatcaaagagcatgcatttttccggtatattgattgggagaaacttgaacgcaaagagatccagcccccttataagccaaaagctagagacaagagagacacctccaacttcgacaaagagttcaccagacagcctgtggaactgacccccactgataaactcttcatcatgaacttggaccaaaatgaatttgctggcttctcttatactaacccagagtttgtcattaatgtgtaggtgaatgcaaactccatcgttgagcctggggtgtaagacttcaagccaagcgtatgtatcaattctagtcttccaggattcacggtgcacatgctggcattcaacatgtggaaagcttgtcttagagggcttttctttgtatgtgtagcttgctagtttgttttctacatttgaaaatgtttagtttagaataagcgcattatccaattatagaggtacaattttccaaacttccagaaactcatcaaatgaacagacaatgtcaaaactactgtgtctgataccaaaatgcttcagtatttgtaatttttcaagtcagaagctgatgttcctggtaaaagtttttacagttattctataatatcttctttgaatgctaagcatgagcgatatttttaaaaattgtgagtaagctttgcagttactgtgaactattgtctcttggaggaagttttttgtttaagaattgatatgattaaactgaattaatatatgcaa

SEQ ID NO: 115 - DNA, 2964 bp, HOMO SAPIENS
ctcagcccggacccaggatggcggaggccaataacccctcggagcaggagctggagagtgagcctcgcagctggtccctgctagagcagctgggcctggccggggcagacctggcggcccccggggtacagcagcagctggagctggagcgggagcggctgcggcgggaaatccgcaaggagctgaagctgaaggagggtgctgagaacctgcggcgggccaccactgacctgggccgcagcctgggccccgtagagctgctgctgcggggctcctcgcgccgcctcgacctgctgcaccagcagctgcaggagctgcacgcccacgtggtgcttcccgacccggcggccacccacgatggcccccagtcccctggtgcgggtggccccacctgctcggccaccaacctgagccgcgtggcgggcctggagaagcagttggccattgagctgaaggtgaagcagggggcggagaacatgatccagacctacagcaatggcagcaccaaggaccggaagctgctgctgacagcccagcagatgttgcaggacagtaagaccaagattgacatcatccgcatgcaactccgccgggcgctgcaggccggccagctggagaaccaggcagccccggatgacacccaagggagtcctgacctgggggctgtggagctgcgcatcgaagagctgcggcaccacttccgagtggagcacgcggtggccgagggtgccaagaacgtactgcgcctgctcagcgctgccaaggccccggaccgcaaggcagtcagcgaggcccaggagaaattgacagaatccaaccagaagctggggctgctgcgggaggctctggagcggagacttggggagctgcccgccgaccaccccaaggggcggctgctgcgagaagagctcgctgcggcctcctccgctgccttcagcacccgcctggccgggccctttcccgccacgcactacagcaccctgtgcaagcccgcgccgctcacagggaccctggaggtacgagtggtgggctgcagagacctcccagagaccatcccgtggaaccctaccccctcaatggggggacctgggaccccagacagccgcccccccttcctgagccgcccagcccggggcctttacagccgaagcggaagcctcagtggccggagcagcctcaaagcagaagccgagaacaccagtgaagtcagcactgtgcttaagctggataacacagtggtggggcagacgtcttggaagccatgtggccccaatgcctgggaccagagcttcactctggagctggaaagggcacgggaactggagttggctgtgttctggcgggaccagcggggcctgtgtgccctcaaattcctgaagttggaggatttcttggacaatgagaggcatgaggtgcagctggacatggaaccccagggctgcctggtggctgaggtcaccttccgcaaccctgtcattgagaggattcctcggctccgacggcagaagaaaattttctccaagcagcaagggaaggcgttccagcgtgctaggcagatgaacatcgatgtcgccacgtgggtgcggctgctccggaggctcatccccaatgccacgggcacaggcacctttagccctggggcttctccaggatccgaggcccggaccacgggtgacatatcggtggagaagctgaacctcggcactgactcggacagctcacctcagaagagctcgcgggatcctccttccagcccatcgagcctgagctcccccatccaggaatccactgctcccgagctgccttcggagacccaggagaccccaggccccgccctgtgcagccctctgaggaagtcacctctgaccctcgaagatttcaagttcctggcggtgctgggccggggtcattttgggaaggtgctcctctccgaattccggcccagtggggagctgttcgccatcaaggctctgaagaaaggggacattgtggcccgagacgaggtggagagcctgatgtgtgagaagcggatattggcggcagtgaccagtgcgggacaccccttcctggtgaacctcttcggctgtttccagacaccggagcacgtgtgcttcgtgatggagtactcggccggtggggacctgatgctgcacatccacagcgacgtgttctctgagccccgtgccatcttttattccgcctgcgtggtgctgggcctacagtttcttcacgaacacaagatcgtctacagggacctgaagttggacaatttgctcctggacaccgagggctacgtcaagatcgcagactttggcctctgcaaggaggggatgggctatggggaccggaccagcacattctgtgggaccccggagttcctggcccctgaggtgctgacggacacgtcgtacacgcgagctgtggactggtggggactgggtgtgctgctctacgagatgctggttggcgagtccccattcccaggggatgatgaggaggaggtcttcgacagcatcgtcaacgacgaggttcgctacccccgcttcctgtcggccgaagccatcggcatcatgagaaggctgcttcggaggaacccagagcggaggctgggatctagcgagagagatgcagaagatgtgaagaaacagcccttcttcaggactctgggctgggaagccctgttggcccggcgcctgccaccgccctttgtgcccacgctgtccggccgcaccgacgtcagcaacttcgacgaggagttcaccggggaggcccccacactgagcccgccccgcgacgcgcggcccctcacagccgcggagcaggcagccttcctggacttcgacttcgtggccgggggctgctagccccctcccctgcccctgcccctgcccctgcccgagagctcttagtttttaaaaaggcctttgggatttgccggatccttgcaaaaaaaaaaaaaaaaaa

SEQ ID NO: 116 - DNA, 1499 bp, HOMO SAPIENS
gcccctccctccgcccgcccgccggcccgcccgtcagtctggcaggcaggcaggcaatcggtccgagtggctgtcggctcttcagctctcccgctcggcgtcttccttcctcctcccggtcagcgtcggcggctgcaccggcggcggcgcagtccctgcgggaggggcgacaagagctgagcggcggccgccgagcgtcgagctcagcgcggcggaggcggcggcggcccggcagccaacatggcggcggcggcggcggcgggcgcgggcccggagatggtccgcgggcaggtgttcgacgtggggccgcgctacaccaacctctcgtacatcggcgagggcgcctacggcatggtgtgctctgcttatgataatgtcaacaaagttcgagtagctatcaagaaaatcagcccctttgagcaccagacctactgccagagaaccctgagggagataaaaatcttactgcgcttcagacatgagaacatcattggaatcaatgacattattcgagcaccaaccatcgagcaaatgaaagatgtatatatagtacaggacctcatggaaacagatctttacaagctcttgaagacacaacacctcagcaatgaccatatctgctattttctctaccagatcctcagagggttaaaatatatccattcagctaacgttctgcaccgtgacctcaagccttccaacctgctgctcaacaccacctgtgatctcaagatctgtgactttggcctggcccgtgttgcagatccagaccatgatcacacagggttcctgacagaatatgtggccacacgttggtacagggctccagaaattatgttgaattccaagggctacaccaagtccattgatatttggtctgtaggctgcattctggcagaaatgctttctaacaggcccatctttccagggaagcattatcttgaccagctgaaccacattttgggtattcttggatccccatcacaagaagacctgaattgtataataaatttaaaagctaggaactatttgctttctcttccacacaaaaataaggtgccatggaacaggctgttcccaaatgctgactccaaagctctggacttattggacaaaatgttgacattcaacccacacaagaggattgaagtagaacaggctctggcccacccatatctggagcagtattacgacccgagtgacgagcccatcgccgaagcaccattcaagttcgacatggaattggatgacttgcctaaggaaaagctcaaagaactaatttttgaagagactgctagattccagccaggatacagatcttaaatttgtcaggtacctggagtttaatacagtgagctctagcaagggaggcgctgccttttgtttctagaatattatgttcctcaaggtccattattttgtattcttttccaagctccttattggaaggtatttttttaaatttagaattaaaaattatttagaaagttacatataaa

SEQ ID NO: 117 - DNA, 3957 bp, HOMO SAPIENS
cggcagggttggaaaatgatggaagaggcggaggtggaggcgaccgagtgctgagaggaacctgcggaatcggccgagatggggtctggcgcgcgctttccctcggggacccttcgtgtccggtggttgctgttgcttggcctggtgggcccagtcctcggtgcggcgcggccaggctttcaacagacctcacatctttcttcttatgaaattataactccttggagattaactagagaaagaagagaagcccctaggccctattcaaaacaagtatcttatgttattcaggctgaaggaaaagagcatattattcacttggaaaggaacaaagaccttttgcctgaagattttgtggtttatacttacaacaaggaagggactttaatcactgaccatcccaatatacagaatcattgtcattatcggggctatgtggagggagttcataattcatccattgctcttagcgactgttttggactcagaggattgctgcatttagagaatgcgagttatgggattgaacccctgcagaacagctctcattttgagcacatcatttatcgaatggatgatgtctacaaagagcctctgaaatgtggagtttccaacaaggatatagagaaagaaactgcaaaggatgaagaggaagagcctcccagcatgactcagctacttcgaagaagaagagctgtcttgccacagacccggtatgtggagctgttcattgtcgtagacaaggaaaggtatgacatgatgggaagaaatcagactgctgtgagagaagagatgattctcctggcaaactacttggatagtatgtatattatgttaaatattcgaattgtgctagttggactggagatttggaccaatggaaacctgatcaacatagttgggggtgctggtgatgtgctggggaacttcgtgcagtggcgggaaaagtttcttatcacacgtcggagacatgacagtgcacagctagttctaaagaaaggttttggtggaactgcaggaatggcatttgtgggaacagtgtgttcaaggagccacgcaggcgggattaatgtgtttggacaaatcactgtggagacatttgcttccattgttgctcatgaattgggtcataatcttggaatgaatcacgatgatgggagagattgttcctgtggagcaaagagctgcatcatgaattcaggagcatcgggttccagaaactttagcagttgcagtgcagaggactttgagaagttaactttaaataaaggaggaaactgccttcttaatattccaaagcctgatgaagcctatagtgctccctcctgtggtaataagttggtggacgctggggaagagtgtgactgtggtactccaaaggaatgtgaattggacccttgctgcgaaggaagtacctgtaagcttaaatcatttgctgagtgtgcatatggtgactgttgtaaagactgtcggttccttccaggaggtactttatgccgaggaaaaaccagtgagtgtgatgttccagagtactgcaatggttcttctcagttctgtcagccagatgtttttattcagaatggatatccttgccagaataacaaagcctattgctacaacggcatgtgccagtattatgatgctcaatgtcaagtcatctttggctcaaaagccaaggctgcccccaaagattgtttcattgaagtgaattctaaaggtgacagatttggcaattgtggtttctctggcaatgaatacaagaagtgtgccactgggaatgctttgtgtggaaagcttcagtgtgagaatgtacaagagatacctgtatttggaattgtgcctgctattattcaaacgcctagtcgaggcaccaaatgttggggtgtggatttccagctaggatcagatgttccagatcctgggatggttaacgaaggcacaaaatgtggtgctggaaagatctgtagaaacttccagtgtgtagatgcttctgttctgaattatgactgtgatgttcagaaaaagtgtcatggacatggggtatgtaatagcaataagaattgtcactgtgaaaatggctgggctcccccaaattgtgagactaaaggatacggaggaagtgtggacagtggacctacatacaatggtcagatggcaaaaatcaagcaaacccttctagacagccggggagtgttcctcgacatgtttctccagtgacacctcccagagaagttcctatatatgcaaacagatttgcagtaccaacctatgcagccaagcaacctcagcagttcccatcaaggccacctccaccacaaccgaaagtatcatctcagggaaacttaattcctgcccgtcctgctcctgcacctcctttatatagttccctcacttgatttttttaaccttctttttgcaaatgtcttcagggaactgagctaatactttttttttttcttgatgttttcttgaaaagcctttctgttgcaactatgaatgaaaacaaaacaccacaaaacagacttcactaacacagaaaaacagaaactgagtgtgagagttgtgaaatacaaggaaatgcagtaaagccagggaatttacaataacatttccgtttccatcattgaataagtcttattcagtcatcggtgaggttaatgcactaatcatggattttttgaacatgttattgcagtgattctcaaattaactgtattggtgtaagagttttgtcattaagtgtttaagtgttattctgaattttctaccttagttatcattaatgtagttcctcattgaacatgtgataatctaatacctgtgaaaactgactaatcagctgccaataatatctaatatttttcatcatgcacgaattaataatcatcatactctagaatcttgtctgtcactcactacatgaataagcaaatattgtcttcaaaagaatgcacaagaaccacaattaagatgtcatattattttgaaagtacaaaatatactaaaagagtgtgtgtgtattcacgcagttactcgcttccatttttatgacctttcaactataggtaataactcttagagaaattaatttaatattagaatttctattatgaatcatgtgaaagcatgacattcgttcacaatagcactattttaaataaattataagctttaaggtacgaagtatttaatagatctaatcaaatatgttgattcatggctataataaagcaggagcaattataaaatcttcaatcaattgaacttttacaaaaccacttgagaatttcatgagcactttaaaatctgaactttcaaagcttgctattaaatcatttagaatgtttacatttactaaggtgtgctgggtcatgtaaaatattagacactaatattttcatagaaattaggctggagaaagaaggaagaaatggttttcttaaatacctacaaaaaagttactgtggtatctatgagttatcatcttagctgtgttaaaaatgaatttttactatggcagatatggtatggatcgtaaaattttaagcactaaaaattttttcataacctttcataataaagtttaataataggtttattaactgaatttcattagttttttaaaagtgtttttggtttgtgtatatatacatatacaaatacaacatttacaataaataaaatacttgaaattctcttttgtgtctcctagtagcttcctactcaactatttataatctcattaattaaaaagttataattttagataaaaattctagtcaaatttttacagatattatctcactaattttcagacttttgccaaagtgtgcacaatggctttttgttaataaagaacagattagttttgaagaaggcaaaaatttcagttttctgaagacagcatgttattttaacaatcaagtatacatattaaaaattgtgagcaatctcaaa

SEQ ID NO: 118 - DNA, 5324 bp, HOMO SAPIENS
gaacggcgatgccccagacgcggctgcagttttcaaaccgcgactgcaagcttcggtagtcctctccgctgctgtcgccaggagtcacttcacgagaagccaggtcacaaccgtcggcccttgtctggaaaagtaaaagtggatcctgccacgttcggagctccctggcgcctcgcccggctggagctagagaactcgtcctgtggcggcccccggcgtggggcgggacagcggccccctggagggggcagtcccgggagaacctgcggcggccggagcggtaaaaataagtgactaaagaagcagacctgggaatcacctaacatgtcgaggaggagatttgattgccgaagtatttcaggcctactaactacaactcctcaaattccaataaaaatggaaaactttaataatttctatatacttacatctaaagagctagggagaggaaaatttgctgtggttagacaatgtatatcaaaatctactggccaagaatatgctgcaaaatttctaaaaaagagaagaagaggacaggattgtcgagcagaaattttacacgagattgctgtgcttgaattggcaaagtcttgtccccgtgttattaatcttcatgaggtctatgaaaatacaagtgaaatcattttgatattggaatatgctgcaggtggagaaattttcagcctgtgtttacctgagttggctgaaatggtttctgaaaatgatgttatcagactcattaaacaaatacttgaaggagtttattatctacatcagaataacattgtacaccttgatttaaagccacagaatatattactgagcagcatataccctctcggggacattaaaatagtagattttggaatgtctcgaaaaatagggcatgcgtgtgaacttcgggaaatcatgggaacaccagaatatttagctccagaaatcctgaactatgatcccattaccacagcaacagatatgtggaatattggtataatagcatatatgttgttaactcacacatcaccatttgtgggagaagataatcaagaaacatacctcaatatttctcaagttaatgtagattattcggaagaaactttttcatcagtttcacagctggccacagactttattcagagccttttagtaaaaaatccagagaaaagaccaacagcagagatatgcctttctcattcttggctacagcagtgggactttgaaaacttgtttcaccctgaagaaacttccagttcctctcaaactcaggatcattctgtaaggtcctctgaagacaagacttctaaatcctcctgtaatggaacctgtggtgatagagaagacaaagagaatatcccagaggatagcagcatggtttccaaaagatttcgtttcgatgactcattacccaatccccatgaacttgtttcagatttgctctgttagcacttttttctttgactcatttggactgaatttgaaattttatatccactccagtgagattatgatttgtagcttcatatatgacatgtttatattgtaaatgcacttttccatggaataatttagggaagtgttttaatgttaaattactagttgctagcatgttatgatttcatatcctgagatagctctgcagataagaaaatatttaaatatatgacaaaaagtaaaattgtacatgtgagtttacatgttaatgaaataattcaacttcaaatgaacttaccagaatgttttgcatatcaacaaaaaaagtggcttgagttttattatagttggtgtaaactgaacacagtgaagacattggaatttaataggttctctctctaaggtgactcttataccatgcctctatcaacataatttgtttaggaaagcagtatgaagtttaagccaaaataatttctactttatagatgctcaagagacattttacaattgaaaatgtctttcaattacaaatattttgaaacttcgtaagattttcattctctgtggtctgttatatgagagagatcctttaactagagcaaagagggagttagaaacctgatcagggatattctttacaagttggagcagaggaaagagtagcatgccttcgtattttaacgcaaatgtctttttcctcctcccaacctacttgagatctgataaggtctggaagatggagatatttggtatgcaagtgtagagttttttaatcctccagaatttctagagtagaagatacttaggtatagttaaatattctgtatttttagtcaaacatatttattaattgaatatagaagaaaatgttgacacactcagacagcttactgaattttagatgtcttctgcatcttagaatacaagccagtcattcagagttctaaaagtatgcataaaaaattacagcaccggtaggtctattaacacagtgcccgagtcagcggtagcaagactgatgtgatcataaaacatgacatcaggctcgtctgaagttcttgtgtgaaattcctagtgagtgaggaggctcagcttaaagccatctgcagagtggcccctcattgtggtcttttgctgggaccaatgcaagagactagggagagcaaaatgtttgcttatggctagagactatatccagccctaatgatggggaaagttagtccttttcgggtaatcttttatgaattttcacctgatgaccgttatattggtctgttatcatgttacgataactgtgatctcatgaccatgttgctgtatcagaagaaatagtttgacaaatggtaacaacaacctgatgttccccctttagacctttaacttctcaaaattttggtaagtttccaaattctttaataataacttaaaactttttgaataactatcaggtcactttatttgaccacatggtgaattcctttaatgtcttcagcatttgttaaggaaaagttttctctacttgtgtgtgtatgtgtgcacatgtgtgtatgtacaggtgtatgtatatatctatagatagatacaatacattctttagacacttttcaagattctttgctgtggtatattgtgctcaactcaggtgccaaaggagctttttttttttttttttttttttgagatggagttttgctctgtctctcaggctggagtgcagtggcatgatctcagctcacggcaacctctgcctcccgggttcaagcaattctcctgtctcagcctcctgagtagttgggattacaggcgcatgccaccgtgcccagctaatttttgtatttttagtagagacggggtttcaccatgttggccaggctggtcacaaactcctgacttcaagtgatccacccgcctcggcctcccaaagtgctgggattacaggcgtgagccactgcgcccccgcccaggagctcttttcttatgacatataaattatgacatttatattctttatatgactttatgttctcttcttatgacatttaaattctttaagtagtttgttggtccaataaactagacgttgtataatctaaattgagcccttgtatatctaaaactgatgagttgtttctaaattgttgattgtccatttacttgcctttggtattaagataatgcaagtaaagtttagtaagtcattggataatgaaatgattatgtttctgaagaccatattatatttttaatttttagaggaatcatgccatcccccaaaaaatcaagaaatatttgaattttaaattataagttcatttgttaaaagacatttttacaaatgtctgaaaatcttaaaatactttacatctacctttaagtagtagaatacagagctgtaaatttccatgccttttttcctgatattaagttttatagtaaaaaagcaactagtgattgcacaaagaatataaaaatccactctttttacaaaggtgtgaatttaaataacgttattgattggaatatgaaaatagaccaatcatttaagagctttttagcaaatgattcaattcttactctttttctcccaagattgaaaagcataatgtatttctctaaagtaggaatctagagagcccctgtgagtggacaaatgtcagtaacacttgaacacatgagaagataagtgttatgttgtgataatttaaagttaaatttgctttttgggtaggatccctaaatagatgggatttttaaatagatgatatatagatgacaattgcaattgtcattttaattattttccctacagtaaagaacctagctctgagcagtgaaattgtaatggcactttaaaggaagtaagccgttaactgttctctagtggagcgatctccaactgttttggcactagggacgggttttgtggaagaaaatttttccacaggactgggggtttagggggatggtttcaggatgattcaagtacattacatttatcattagattctcataaggagcatgcaacctagatctcttgcacgtgtggttcacagcaggattcgagctcctttgagaatctaatgccatggctgatctaacaggaaactgagctcaggcagtaatgcttggcaccgccccccaccttctatgcagcccggtcgtggcctggggactggggacccctgctctagtcagtaataaggtacttgtgccagaatataaatcaacacattgcttcctttatcaaagaagtcttgttatttaaaaaaagtcaactgagccagtatgattagtgatgtaattgattttcattctggcacaagcctctttcattctggacagctcacaaatagttaatggaccatgctttgaatagccttcctctaagcaacatttataaatactgatattttagaactgtttacatttcttctgtttatttttgaattttcagtttgatatcttgtccttattcattgttgtataaacaactgtactttaatttcaagtagtattaaaagtatttcacttcagtttggggggattattatcaatttataattttataaaagtattttaaagaataattgtaaattttccataaattacaacttcctgccatattttattaaataataatcttgcttaaggcatatagacagacattattatgagtattccagtaaaaaaaatctacatcaacttgaccattctggctaaaaattaaaaagcacttttttatatctgtggttgtcatttgtttcaaagcatttctaaatttattgttcttaaaagtatgtctgcatgttctagcctttgacctaggtcatctatgaaccctctttgtgtctaataaacatatctgtaaaggcaaaaaaaaaaaaaaaaaa

SEQ ID NO: 119 - DNA, 6701 bp, HOMO SAPIENS
aggggaggagagcggcccatggacccgcggggcccggcgccccagactctgcgccgtcgggacggagcccaagatgtcggcctaggccggggcgcgacgacgcggacggggcggcgaggaggcgccgctgctgccggggctcgcagccgccgagcccccgagggcgcgccctgacggactggccgagccggcggtgagaggccggcgcgtcgggagcgggccgcgcggcaccatgtcggccaaggtgcggctcaagaagctggagcagctgctcctggacgggccctggcgcaacgagagcgccctgagcgtggaaacgctgctcgacgtgctcgtctgcctgtacaccgagtgcagccactcggccctgcgccgcgacaagtacgtggccgagttcctcgagtgggctaaaccatttacacagctggtgaaagaaatgcagcttcatcgagaagactttgaaataattaaagtaattggaagaggtgcttttggtgaggttgctgttgtcaaaatgaagaatactgaacgaatttatgcaatgaaaatcctcaacaagtgggagatgctgaaaagagcagagaccgcgtgcttccgagaggagcgcgatgtgctggtgaacggcgactgccagtggatcaccgcgctgcactacgcctttcaggacgagaaccacctgtacttagtcatggattactatgtgggtggtgatttactgaccctgctcagcaaatttgaagacaagcttccggaagatatggcgaggttctacattggtgaaatggtgctggccattgactccatccatcagcttcattacgtgcacagagacattaaacctgacaatgtccttttggacgtgaatggtcatatccgcctggctgactttggatcatgtttgaagatgaatgatgatggcactgtgcagtcctccgtggccgtgggcacacctgactacatctcgccggagatcctgcaggcgatggaggacggcatgggcaaatacgggcctgagtgtgactggtggtctctgggtgtctgcatgtatgagatgctctatggagaaacgccgttttatgcggagtcactcgtggagacctatgggaagatcatgaaccatgaagagcgattccagttcccatcccatgtcacggatgtatctgaagaagcgaaggacctcatccagagactgatctgcagtagagaacgccggctggggcagaatggaatagaggatttcaaaaagcatgcgttttttgaaggtctaaattgggaaaatatacgaaacctagaagcaccttatattcctgatgtgagcagtccctctgacacatccaacttcgacgtggatgacgacgtgctgagaaacacggaaatattacctcctggttctcacacaggcttttctggattacatttgccattcattggttttacattcacaacggaaagctgtttttctgatcgaggctctctgaagagcataatgcagtccaacacattaaccaaagatgaggatgtgcagcgggacctggagcacagcctgcagatggaagcttacgagaggaggattcggaggctggaacaggagaagctggagctgagcaggaagctgcaagagtccacccagaccgtgcagtccctccacggctcatctcgggccctcagcaattcaaaccgagataaagaaatcaaaaagctaaatgaagaaatcgaacgcttgaagaataaaatagcagattcaaacaggctcgagcgacagcttgaggacacagtggcgcttcgccaagagcgtgaggactccacgcagcggctgcgggggctggagaagcagcaccgcgtggtccggcaggagaaggaggagctgcacaagcaactggttgaagcctcagagcggttgaaatcccaggccaaggaactcaaagatgcccatcagcagcgaaagctggccctgcaggagttctcggagctgaacgagcgcatggcagagctccgtgcccagaagcagaaggtgtcccggcagctgcgagacaaggaggaggagatggaggtggccacgcagaaggtggacgccatgcggcaggaaatgcggagagctgagaagctcaggaaagagctggaagctcagcttgatgatgctgttgctgaggcctccaaggagcgcaagcttcgtgagcacagcgagaacttctgcaagcaaatggaaagcgagctggaggccctcaaggtgaagcaaggaggccggggagcgggtgccaccttagagcaccagcaagagatttccaaaatcaaatccgagctggagaagaaagtcttattttatgaagaggaattggtcagacgtgaggcctcccatgtgctagaagtgaaaaatgtgaagaaggaggtgcatgattcagaaagccaccagctggccctgcagaaagaaatcttgatgttaaaagataagttagaaaagtcaaagcgagaacggcataacgagatggaggaggcagtaggtacaataaaagataaatacgaacgagaaagagcgatgctgtttgatgaaaacaagaagctaactgctgaaaatgaaaagctctgttcctttgtggataaactcacagctcaaaatagacagctggaggatgagctgcaggatctggcagccaagaaggagtcagtggcccactgggaagctcagattgcggaaatcattcagtgggtcagtgacgagaaagatgcccggggttaccttcaagctcttgcttccaagatgaccgaagagctcgaggctttgaggagttctagtctggggtcaagaacactggacccgctgtggaaggtgcgccgcagccagaagctggacatgtccgcgcggctggagctgcagtcggccctggaggcggagatccgggccaagcagcttgtccaggaggagctcaggaaggtcaaggacgccaacctcaccttggaaagcaaactaaaggattccgaagccaaaaacagagaattattagaagaaatggaaattttgaagaaaaagatggaagaaaaattcagagcagatactgggctcaaacttccagattttcaggattccatttttgagtatttcaacactgctcctcttgcacatgacctgacatttagaaccagctcagctagtgagcaagaaacacaagctccgaagccagaagcgtccccgtcgatgtctgtggctgcatcagagcagcaggaggacatggctcggcccccgcagaggccatccgctgtgccgttgcccaccacgcaggccctggctctggctggaccgaagccaaaagctcaccagttcagcatcaagtccttctccagccctactcagtgcagccactgcacctccctgatggttgggctgatccggcagggctacgcctgcgaggtgtgttcctttgcttgccacgtgtcctgcaaagacggtgccccccaggtgtgcccaatacctcccgagcagtccaagaggcctctgggcgtggacgtgcagcgaggcatcggaacagcctacaaaggccatgtcaaggtcccaaagcccacgggggtgaagaagggatggcagcgcgcatatgcagtcgtctgtgactgcaagctcttcctgtatgatctgcctgaaggaaaatccacccagcctggtgtcattgcgagccaagtcttggatctcagagatgacgagttttccgtgagctcagtcctggcctcagatgtcattcatgctacacgccgagatattccatgtatattcagggtgacggcctctctcttaggtgcaccttctaagaccagctcgctgctcattctgacagaaaatgagaatgaaaagaggaagtgggttgggattctagaaggactccagtccatccttcataaaaaccggctgaggaatcaggtcgtgcatgttcccttggaagcctacgacagctcgctgcctctcatcaaggccatcctgacagctgccatcgtggatgcagacaggattgcagtcggcctagaagaagggctctatgtcatagaggtcacccgagatgtgatcgtccgtgccgctgactgtaagaaggtacaccagatcgagcttgctcccagggagaagatcgtaatcctcctctgtggccggaaccaccatgtgcacctctatccgtggtcgtcccttgatggagcggaaggcagctttgacatcaagcttccggaaaccaaaggctgccagctcatggccacggccacactcaagaggaactctggcacctgcctgtttgtggccgtgaaacggctgatcctttgctatgagatccagagaacgaagccattccacagaaagttcaatgagattgtggctcccggcagcgtgcagtgcctggcggtgctcagggacaggctctgtgtgggctacccttctgggttctgcctgctgagcatccagggggacgggcagcctctaaacctggtaaatcccaatgacccctcgcttgcgttcctctcacaacagtcttttgatgccctttgtgctgtggagctcgaaagcgaggagtacctgctttgcttcagccacatgggactgtacgtggacccgcaaggccggagggcacgcgcgcaggagctcatgtggcctgcggctcctgtcgcctgtagttgcagccccacccacgtcacggtgtacagcgagtatggcgtggacgtctttgatgtgcgcaccatggagtgggtgcagaccatcggcctgcggaggataaggcccctgaactctgaaggcaccctcaacctcctcaactgcgagcctccacgcttgatctacttcaagagcaagttctcgggagcggttctcaacgtgccggacacctccgacaacagcaagaagcagatgctgcgcaccaggagcaaaaggcggttcgtcttcaaggtcccagaggaagagagactgcagcagaggcgagagatgcttagagacccagaattgagatccaaaatgatatccaacccaaccaacttcaaccacgtggcccacatgggcccaggcgacggcatgcaggtgctcatggacctgcctctgagtgctgtgcccccctcccaggaggaaaggccgggccccgctcccaccaacctggctcgccagcctccatccaggaacaagccctacatctcgtggccctcatcaggtggatcggagcctagcgtgactgtgcctctgagaagtatgtctgatccagaccaggactttgacaaagagcctgattcggactccaccaaacactcaactccatcgaatagctccaaccccagcggcccaccgagccccaactccccccacaggagccagctccccctcgaaggcctggagcagccggcctgtgacacctgaagccgccagctcgccacaggggccagggagctggagatggcctccagcgtcagtgccaagactgagcgggccctccagtgttgtccaaggaaatgtagaatcactttgtagatatggagatgaagaagacaaatctttattataatattgatcagttttatgccgcattgttcgtggcagtagaccacatctgttcgtctgcacagctgtgaggcgatgctgttccatctgcacatgaaggacccccatacagcctgtctcccacccctgacaacccgagagggcatatggggccctgccaacaccacttcctcagcagaaacccgtcatgacgcggctgcttcggaagcagacatctggggacacagcctcagtacccagtcttttccctagttcctgaaactttcctaggaccttaagagaatagtaggaggtcctatagcattcccagtgtcactagaattttgaagacaggaaagtggaggttagtctgtggcctttttttcatttagccattgcacagtcagctgcagaagtcctgctgaccacctagtcatggacaaaggcccaggaccagtgacaccctgcgtccctgtgtgcattaagttcattctgggtcgcagccatgaagtgtcaccagtatctactactgtgaagtcagctgtgctgttttccattcgcttccacggcttctgcctcctgccataaaaccagcgagtgtcgtggtgcaggcaggccctgtggcctgctgggctgagggaagtcagagccccagggcgccacgaagcagccactgggataccccaccccgccccgccctgcccgcccccccccccaccagtcctgcccccgcatggagcccccgtgattagtagcccgtatgatcacgtagacccacccaacacactcctgcacactggccccggcccacggcacagcaatcccctgcgcgtggatttcacctcaccctttgtaccagatgttgagtgaccagctctgtggccctgtgtcgtcagaggcttgtgattaactgtggcggcagacacagcttgtccacagcttgggccaggcttcccctgtcctcccaccggtcggctgcttggcaaggctgttcaggacgtgcacttccccaagtcggcactgagtggcccagcaccgcctagccctgccaccccactgccctcctgggccttctgctggatgggcacctggggggttctggtttttacttttttaatgtaagtctcagtctttgtaattaattattgaattgtgagaacatttttgaacaatttacctgtcaataaagcagaagacggcagttttaaagttc

SEQ ID NO: 120 - DNA, 1122 bp, HOMO SAPIENS
gaattgcagtccccgctctgctctgtccggtcacaggactttttgccctctgttcccgggtccctcaggcggccacccagtgggcacactcccaggcggcgctccggccccgcgctccctccctctgcctttcattcccagctgtcaacatcctggaagctttgaagctcaggaaagaagagaaatccactgagaacagtctgtaaaggtccgtagtgctatctacatccagacggtggaagggagagaaagagaaagaaggtatcctaggaatacctgcctgcttagaccctctataaaagctctgtgcatcctgccactgaggactccgaagaggtagcagtcttctgaaagacttcaactgtgaggacatgtcgttcagatttggccaacatctcatcaagccctctgtagtgtttctcaaaacagaactgtccttcgctcttgtgaataggaaacctgtggtaccaggacatgtccttgtgtgcccgctgcggccagtggagcgcttccatgacctgcgtcctgatgaagtggccgatttgtttcagacgacccagagagtcgggacagtggtggaaaaacatttccatgggacctctctcaccttttccatgcaggatggccccgaagccggacagactgtgaagcacgttcacgtccatgttcttcccaggaaggctggagactttcacaggaatgacagcatctatgaggagctccagaaacatgacaaggaggactttcctgcctcttggagatcagaggaggaaatggcagcagaagccgcagctctgcgggtctactttcagtgacacagatcctgaattccagcaaaagagctattgccaaccagtttgaagaccgccccccgcctctccccaagaggaactgaatcagcatgaaaatgcagtttcttcatctcaccatcctgtattcttcaaccagtgatcccccacctcggtcactccaactcccttaaaatacctagacctaaacggctcagacaggcagatttgaggtttccccctgtctccttattcggcagccttatgattaaacttccttctctgctgcaaaaaaaaaaaaaaaaaaaaaaaaaaaaaaaaaaaaaaaaaaaaa

SEQ ID NO: 121 - DNA, 2421 bp, HOMO SAPIENS
ggctcctcctcttcccctccgccgcggcccgccccggcccgcaaacccaaacactccaggcgcccgcccgccgcgcgtgattctcgcctcgccgcagcccagccctgcgcgccttgcccggcggcccccgcccggccgctccgggcccctggccccgcggagcgatgctgctgctggctgccgccttcctcgtggccttcgtgctgctgctgtacatggtgtctccgctcatcagccccaagcccctcgccctgcccggggcgcatgtggtggttacaggaggttccagtggcatcgggaagtgcattgctatcgagtgctataaacaaggagcttttataactctggttgcacgaaatgaggataagctgctgcaggcaaagaaagaaattgaaatgcactctattaatgacaaacaggtggtactttgcatatcagttgatgtatctcaagactataaccaagtagagaatgtcataaaacaagcacaggagaaactgggtccagtggacatgctggtaaattgtgcaggaatggcagtgtcaggaaaatttgaagatcttgaagttagtacctttgaaaggttaatgagcatcaattacctgggcagcgtgtaccccagccgggccgtgatcaccaccatgaaggagcgccgggtgggcaggatcgtgtttgtgtcctcccaggcaggacagttgggattattcggtttcacagcctactctgcatccaagtttgccataaggggattggcagaagctttgcagatggaggtgaagccatataatgtctacatcacagttgcttacccaccagacacagacacacctggctttgccgaagaaaacagaacaaagcctttggagactcgacttatttcagagaccacatctgtgtgcaaaccagaacaggtggccaaacaaattgttaaagatgccatacaaggaaatttcaacagttcccttggctcagatgggtacatgctctcggccctgacctgtgggatggctccagtaacttctattactgaggggctccagcaggtggtcaccatgggccttttccgcactattgctttgttttaccttggaagttttgacagcatagttcgtcgctgcatgatgcagagagaaaaatctgaaaatgcagacaaaactgcctaatcttcttaccccttggaagaagactgtttccaaataatttgaacagcttgctgctaaatgggacccaatttttggcctatagacacttatgtattgttttcgaatacgtcagattggaccagtgctcttcaggaatgtggctgcaagcaaggggctagaagttcacctcctgacagtattattaatactatgcaaatatggaataggagaccatttgattttctaggctttgtggtagagaggtgaaggtatgagaattaatagcgtgtgaacaaagtaaagaacaggattccagaatgatcattaaatttgtttctatttattcttttttgcccccctagagattaagtccagaaatgtactttctggcacataaagaaatcttgaggactttgtttaaaccttccataaaaaaacaattttcggtttctcggtctctgtctctctgtctctctgtctctctgtctctctgtctctctgtctctctctctctctctctttctttctttgtgtattttattcaagatgagttggacccattgccagtgagtctgaatgtcactgacagccctgtgttgtgctcaggactcactctgctgctggtggaaactcatggcttctctctctctttgatcccataaagctacgagggggacgggagagggcagtgcaatgggaagtaaagagatattttccagtaggaaaagcaatgctttcttgtctttagactcaaatgcttagggaacgtttcatttctcattcatggggaaaggcagcctccttaaatgttttctgaagagcggtaaaatctagaagcttaagaatttacagttccttcaataaccatgatgacctgaagttcacctatcccattttagcatctacttgtttttcccatctcttcctttccaattttgcttatactgctgtaatatttttgtaaaaaaaaaaaaaaaggaaaaaaaagaccagctaaaattttcgacttgactttttaacttaactcatgaattaattaaagcaaatgaaaaaattaaaaagtgtgactttttctcggagcatatatgtagcttttaggaaaggctgatgatggtataaagtttgctcattaagaaaaaaagacaaggctgattttgaagagagttgcttttgaaataaaatgatcacctgttctttatgtgactctcccactgaacctgcagacattatttttataccacatgctaaggaagcccactcatctaactctgtagccctg

SEQ ID NO: 122 - DNA, 6916 bp, HOMO SAPIENS
ttttgtttttttttttttcggcggagatcctcgttggggctgggaaactcctgcaaaactcgagaccaggaagccagcccgcaccccaacccccaccaaagccacctactcttcttctgtgggaggccagtccacatccgctctcacccgagagagatattcagctggatccaaagtgactgatgaagggaaggaaatcatgtcaagcgaagccttgaaaaagctgccctgagacggtgtcccgccgaaagaatgttggctcaattaagaaacatcagggagataaattcaacccagtgtgtctaaaaatgactacaaaacgaagtttgtttgtgcggttggtaccatgtcgctgtctacgaggggaagaggagactgtcactactcttgattattctcattgcagcttagaacaagttccgaaagagatttttacttttgaaaaaaccttggaggaactctatttagatgctaatcagattgaagagcttccaaagcaactttttaactgtcagtctttacacaaactgagtttgccagacaatgatttaacaacgttaccagcatccattgcaaaccttattaatctcagggaactggatgtcagcaagaatggaatacaggagtttccagaaaatataaaaaattgtaaagttttgacaattgtggaggccagtgtaaaccctatttccaagctccctgatggattttctcagctgttaaacctaacccagttgtatctgaatgatgcttttcttgagttcttgccagcaaattttggcagattaactaaactccaaatattagagcttagagaaaaccagttaaaaatgttgcctaaaactatgaatagactgacccagctggaaagattggatttgggaagtaacgaattcacggaagtgcctgaagtacttgagcaactaagtggattgaaagagttttggatggatgctaatagactgacttttattccagggtttattggtagtttgaaacagctcacatatttggatgtttctaaaaataatattgaaatggttgaagaaggaatttcaacatgtgaaaaccttcaagacctcctattatcaagcaattcacttcagcagcttcctgagactattggttcgttgaagaatataacaacgcttaaaatagatgaaaaccagttaatgtatctgccagactctataggagggttaatatcagtagaagaactggattgtagtttcaatgaagttgaagctttgccttcatctattgggcagcttactaacttaagaacttttgctgctgatcataattacttacagcagttgcccccagagattggaagctggaaaaatataactgtgctgtttctccattccaataaacttgagacacttccagaggaaatgggtgatatgcaaaaattaaaagtcattaatttaagtgataatagattaaagaatttaccctttagctttacaaagctacagcaattgacagctatgtggctctcagataatcagtccaaacccctgatacctcttcaaaaagaaactgattcagagacccagaaaatggtgcttaccaactacatgttccctcaacagccaaggactgaggatgttatgtttatatcagataatgaaagttttaacccttcattgtgggaggaacagaggaaacagcgggctcaagttgcatttgaatgtgatgaagacaaagatgaaagggaggcacctcccagggagggaaatttaaaaagatatccaacaccatacccagatgagcttaagaatatggtcaaaactgttcaaaccattgtacatagattaaaagatgaagagaccaatgaagactcaggaagagatttgaaaccacatgaagatcaacaagatataaataaagatgtgggtgtgaagacctcagaaagtactactacagtaaaaagcaaagttgatgaaagagaaaaatatatgataggaaactctgtacagaagatcagtgaacctgaagctgagattagtcctgggagtttaccagtgactgcaaatatgaaagcctctgagaacttgaagcatattgttaaccatgatgatgtttttgaggaatctgaagaactttcttctgatgaagagatgaaaatggcggagatgcgaccaccattaattgaaacctctattaaccagccaaaagtcgtagcacttagtaataacaaaaaagatgatacaaaggaaacagattctttatcagatgaagttacacacaatagcaatcagaataacagcaattgttcttctccatctcggatgtctgattcagtttctcttaatactgatagtagtcaagacacctcactctgctctccagtgaaacaaactcatattgatattaattccaaaatcaggcaagaagatgaaaattttaacagccttttacaaaatggagatattttaaacagttcaacagaggaaaagttcaaagctcatgataaaaaagattttaacttacctgaatatgatttgaatgttgaagagcgattagttctaattgagaaaagtgttgactcaacagccacagctgatgacactcacaaattagatcatatcaatatgaatcttaataaacttataactaatgatacatttcaaccagagatcatggaaagatcaaaaacacaggatattgtgcttggaacaagctttttaagcattaattctaaagaggaaactgagcacttggaaaatggaaacaagtatcctaatttggaatccgtaaataaggtaaatggacattctgaggaaacttcccagtctcctaataggactgaaccacatgacagtgattgttctgttgacttaggtatttccaaaagcactgaagatctctcccctcagaaaagtggtccagttggatctgttgtgaaatctcatagcataactaatatggagattggagggctaaaaatctatgatattcttagtgataatggacctcagcagccaagtacaaccgttaaaatcacatctgctgttgatggaaaaaatatagtcaggagcaagtctgccacactgttgtatgatcaaccattgcaggtatttactggttcttcctcatcttctgatttaatatcaggaacaaaggcaattttcaagtttgattcaaatcataatcccgaagagccaaatataataagaggccccacaagtggcccacaatctgcacctcaaatatatggtcctccacagtataatatccaatacagtagcagtgctgcagtcaaagacactttgtggcactccaaacaaaatccccaaatagaccatgccagttttcctcctcagctccttcctagatcagagagcacagaaaatcaaagttatgctaaacattctgccaatatgaatttctctaatcataacaatgttcgagctaatactgcataccatttacatcagagacttggcccagcaagacatggggaaatgtgggccatctcaccaaacgaccgacttattcctgcagtaactcgaagtacaatccagcgacaaagtagtgtgtcctccacagcctctgtaaatcttggtgatccaggctctacaaggcgggctcagattcctgaaggagattatttatcatacagagagttccactcagcgggaagaactcctccaatgatgccaggatcacagagacccctttctgcacgaacatacagcatagatggtccaaatgcatcaagacctcagagtgctcgaccctctattaatgaaataccagagagaactatgtcagttagtgatttcaattattcacggactagtccttcaaaaagaccaaatgcaagggttggttctgagcattctttattagatcctccaggaaaaagtaaagttcctcgtgactggagagaacaagtacttcgacatattgaagccaaaaagttagaaaagatgcctttgagtaatggacagatgggccagcctctcaggcctcaggcaaattatagtcaaatacatcacccccctcaggcatctgtggcaaggcatccctctagagaacaactaattgattacttgatgctgaaagtggcccaccagcctccatatacacagccccattgttctcctagacaaggccatgaactggcaaaacaagagattcgagtgagggttgaaaaggatccagaacttggatttagcatatcaggtggtgtcgggggtagaggaaacccattcagacctgatgatgatggtatatttgtaacaagggtacaacctgaaggaccagcatcaaaattactgcagccaggtgataaaattattcaggctaatggctacagttttataaatattgaacatggacaagcagtgtccttgctaaaaactttccagaatacagttgaactcatcattgtacgagaagtttcctcataagcactgtggacaaaaaaagcggggaagacagcaagatttattggaagatacttacaggggaaattaatattttgactatttttatatataaagaagaactcaaaaaattatgttcaaatttgtacattaatgaaataatggaacttgtggttagagggaaagaaccactgtacagaatataaaggagactgttgaattcataccatataaaacttgttaggtttttaaacatagcaatcaaggctacaaaaacaaacctgtgttgtttttgtatagattgtaggtttatttttggatttcatatacatgactgaactgtgtgcaaggcaatagttagccttgattttagcccagagacagatggcagagctatctctctcatagcttttatgcccttatttttattcaactggtattaatgtttttctcctgaaactactttttttgatgtgggcaagagatttgaagtgttggcttttgctatgtgcatattgaattgaagagtgagtaggtgaaggtggtgctggtgggttcactttccaaggccagactaaaacagttattttctataaaaatctggaagcaaagaatggggatggggagagctacgtggtagtatgtttttattaggagaataatgcaataaaatatgtaatgtcttttttataaagcaaaaaagacaataattgcatttatgagctcggcaggatctgttcttgtcatagccattgactatacatttgctactggtgattcagtttttaattttttagtcacaggaaatttttaactctactgtagatgcatgtccatgcattttctgtgttatggaaatccactgatttttttttttttttcaaatggtggtacttgcaatctgttttataattagtgctccatttaaatctaatttataatttttattttaagcagcaaatgaaacaaaaatggccagttttaagattgtgttgcctgtaacacaaaatgttacgaaggtttaggaaagcctctttgatttttgtttggccttgcattgccttggtaaagtaaaaggaaacagtacacttggagctaggaaaccaaagcaagctttgtgaaactggcacagtgatagagaattgctgtggagagttatagagcaaagggatgggtccttgaggcctgccagtgtgtaaaggtgttcaaataaagggctgtttctacaggtaacattaaatgtgaactcaacacttccagagtctttaaagggtttctatgtgtatcagtgtaatagtgttttaccaccaactgcctttctttgttcctagttactgtaacaaatatttgatgatagaggtttattaattttgtttatccagaccattaattttatttgtttttgttctatgtaatcaaataaaatttgagtaacatgtaatggtaaggattaatgcatggttatttggaccagaaaaaagtgccatagaagaccaataactgtttagttgaggctagtctggaacctttcattagagcaatatttggttattgcacttcatttttatttactaagaaatgcaatttgggaatttttaatctgttatgctttgtttatcaaccttgattttaattaagacttttataagactagcttaaaacaccaaccaacattatttttgcaaaagtgagttggactcactttccattcttgctagtcagagtaagtaggcagcacttttaaaaatatgtgaactcaaatattgcacttctttcaagatgttatcaattggttattgtactgtatagttttaataattttgattgaaaccctttaacaactctttgtaaattttaactcattttagttgattttcagtactatttacataggaattgatttttatggatatagtagaagaaatgtgctgtattttgataaaattcacttattgtatgtgtgttgtaatctaaaaaaaaaaagaatgacaaacagcttctttaagacaagtctcggtgttccctttattcttagtttgtttttaaatattaattttggcattctaaaatagctaacatttcttttattgatttcagattttcacaggcacattctacttttaatcagaaatatatttaataagtataattgtgaagttttcaactactttaccttgaaccacatataccaattataattttggaaaaggaattaagcctcacggaacaatggatcttcagcaaaccttaacttcattgtctgcacattacattgaagtattataaatgcaacagatgttatatgcactggcattttatcctactctagttagttaaaattttatagtattcttgcaacacataaagttgcgtaagaaactttaccaagaggagtattatagccaagttttctttgaaagtattggaaaactaaaattaaatgacaaggactttgaattagaattttgctgtaataaagtttcaaaatttgaataaaataattaaattttttgagg

SEQ ID NO: 123 - DNA, 9093 bp, HOMO SAPIENS
cgagcccagtcgagccgcgctcacctcgggctcccgctccgtctccacctccgcctttgccctggcggcgcgaccccgtcccgggcgcggcccccagcagtcgcgcgccgttagcctcgcgcccgccgcgcagtccgggcccggcgcgatgggggccgccgccggccggagcccccacctggggcccgcgcccgcccgccgcccgcagcgctctctgctcctgctgcagctgctgctgctcgtcgctgccccggggtccacgcaggcccaggccgccccgttccccgagctgtgcagttatacatgggaagctgttgataccaaaaataatgtactttataaaatcaacatctgtggaagtgtggatattgtccagtgcgggccatcaagtgctgtttgtatgcacgacttgaagacacgcacttatcattcagtgggtgactctgttttgagaagtgcaaccagatctctcctggaattcaacacaacagtgagctgtgaccagcaaggcacaaatcacagagtccagagcagcattgccttcctgtgtgggaaaaccctgggaactcctgaatttgtaactgcaacagaatgtgtgcactactttgagtggaggaccactgcagcctgcaagaaagacatatttaaagcaaataaggaggtgccatgctatgtgtttgatgaagagttgaggaagcatgatctcaatcctctgatcaagcttagtggtgcctacttggtggatgactccgatccggacacttctctattcatcaatgtttgtagagacatagacacactacgagacccaggttcacagctgcgggcctgtccccccggcactgccgcctgcctggtaagaggacaccaggcgtttgatgttggccagccccgggacggactgaagctggtgcgcaaggacaggcttgtcctgagttacgtgagggaagaggcaggaaagctagacttttgtgatggtcacagccctgcggtgactattacatttgtttgcccgtcggagcggagagagggcaccattcccaaactcacagctaaatccaactgccgctatgaaattgagtggattactgagtatgcctgccacagagattacctggaaagtaaaacttgttctctgagcggcgagcagcaggatgtctccatagacctcacaccacttgcccagagcggaggttcatcctatatttcagatggaaaagaatatttgttttatttgaatgtctgtggagaaactgaaatacagttctgtaataaaaaacaagctgcagtttgccaagtgaaaaagagcgatacctctcaagtcaaagcagcaggaagataccacaatcagaccctccgatattcggatggagacctcaccttgatatattttggaggtgatgaatgcagctcagggtttcagcggatgagcgtcataaactttgagtgcaataaaaccgcaggtaacgatgggaaaggaactcctgtattcacaggggaggttgactgcacctacttcttcacatgggacacggaatacgcctgtgttaaggagaaggaagacctcctctgcggtgccaccgacgggaagaagcgctatgacctgtccgcgctggtccgccatgcagaaccagagcagaattgggaagctgtggatggcagtcagacggaaacagagaagaagcattttttcattaatatttgtcacagagtgctgcaggaaggcaaggcacgagggtgtcccgaggacgcggcagtgtgtgcagtggataaaaatggaagtaaaaatctgggaaaatttatttcctctcccatgaaagagaaaggaaacattcaactctcttattcagatggtgatgattgtggtcatggcaagaaaattaaaactaatatcacacttgtatgcaagccaggtgatctggaaagtgcaccagtgttgagaacttctggggaaggcggttgcttttatgagtttgagtggcacacagctgcggcctgtgtgctgtctaagacagaaggggagaactgcacggtctttgactcccaggcagggttttcttttgacttatcacctctcacaaagaaaaatggtgcctataaagttgagacaaagaagtatgacttttatataaatgtgtgtggcccggtgtctgtgagcccctgtcagccagactcaggagcctgccaggtggcaaaaagtgatgagaagacttggaacttgggtctgagtaatgcgaagctttcatattatgatgggatgatccaactgaactacagaggcggcacaccctataacaatgaaagacacacaccgagagctacgctcatcacctttctctgtgatcgagacgcgggagtgggcttccctgaatatcaggaagaggataactccacctacaacttccggtggtacaccagctatgcctgcccggaggagcccctggaatgcgtagtgaccgacccctccacgctggagcagtacgacctctccagtctggcaaaatctgaaggtggccttggaggaaactggtatgccatggacaactcaggggaacatgtcacgtggaggaaatactacattaacgtgtgtcggcctctgaatccagtgccgggctgcaaccgatatgcatcggcttgccagatgaagtatgaaaaagatcagggctccttcactgaagtggtttccatcagtaacttgggaatggcaaagaccggcccggtggttgaggacagcggcagcctccttctggaatacgtgaatgggtcggcctgcaccaccagcgatggcagacagaccacatataccacgaggatccatctcgtctgctccaggggcaggctgaacagccaccccatcttttctctcaactgggagtgtgtggtcagtttcctgtggaacacagaggctgcctgtcccattcagacaacgacggatacagaccaggcttgctctataagggatcccaacagtggatttgtgtttaatcttaatccgctaaacagttcgcaaggatataacgtctctggcattgggaagatttttatgtttaatgtctgcggcacaatgcctgtctgtgggaccatcctgggaaaacctgcttctggctgtgaggcagaaacccaaactgaagagctcaagaattggaagccagcaaggccagtcggaattgagaaaagcctccagctgtccacagagggcttcatcactctgacctacaaagggcctctctctgccaaaggtaccgctgatgcttttatcgtccgctttgtttgcaatgatgatgtttactcagggcccctcaaattcctgcatcaagatatcgactctgggcaagggatccgaaacacttactttgagtttgaaaccgcgttggcctgtgttccttctccagtggactgccaagtcaccgacctggctggaaatgagtacgacctgactggcctaagcacagtcaggaaaccttggacggctgttgacacctctgtcgatgggagaaagaggactttctatttgagcgtttgcaatcctctcccttacattcctggatgccagggcagcgcagtggggtcttgcttagtgtcagaaggcaatagctggaatctgggtgtggtgcagatgagtccccaagccgcggcgaatggatctttgagcatcatgtatgtcaacggtgacaagtgtgggaaccagcgcttctccaccaggatcacgtttgagtgtgctcagatatcgggctcaccagcatttcagcttcaggatggttgtgagtacgtgtttatctggagaactgtggaagcctgtcccgttgtcagagtggaaggggacaactgtgaggtgaaagacccaaggcatggcaacttgtatgacctgaagcccctgggcctcaacgacaccatcgtgagcgctggcgaatacacttattacttccgggtctgtgggaagctttcctcagacgtctgccccacaagtgacaagtccaaggtggtctcctcatgtcaggaaaagcgggaaccgcagggatttcacaaagtggcaggtctcctgactcagaagctaacttatgaaaatggcttgttaaaaatgaacttcacggggggggacacttgccataaggtttatcagcgctccacagccatcttcttctactgtgaccgcggcacccagcggccagtatttctaaaggagacttcagattgttcctacttgtttgagtggcgaacgcagtatgcctgcccacctttcgatctgactgaatgttcattcaaagatggggctggcaactccttcgacctctcgtccctgtcaaggtacagtgacaactgggaagccatcactgggacgggggacccggagcactacctcatcaatgtctgcaagtctctggccccgcaggctggcactgagccgtgccctccagaagcagccgcgtgtctgctgggtggctccaagcccgtgaacctcggcagggtaagggacggacctcagtggagagatggcataattgtcctgaaatacgttgatggcgacttatgtccagatgggattcggaaaaagtcaaccaccatccgattcacctgcagcgagagccaagtgaactccaggcccatgttcatcagcgccgtggaggactgtgagtacacctttgcctggcccacagccacagcctgtcccatgaagagcaacgagcatgatgactgccaggtcaccaacccaagcacaggacacctgtttgatctgagctccttaagtggcagggcgggattcacagctgcttacagcgagaaggggttggtttacatgagcatctgtggggagaatgaaaactgccctcctggcgtgggggcctgctttggacagaccaggattagcgtgggcaaggccaacaagaggctgagatacgtggaccaggtcctgcagctggtgtacaaggatgggtccccttgtccctccaaatccggcctgagctataagagtgtgatcagtttcgtgtgcaggcctgaggccgggccaaccaataggcccatgctcatctccctggacaagcagacatgcactctcttcttctcctggcacacgccgctggcctgcgagcaagcgaccgaatgttccgtgaggaatggaagctctattgttgacttgtctccccttattcatcgcactggtggttatgaggcttatgatgagagtgaggatgatgcctccgataccaaccctgatttctacatcaatatttgtcagccactaaatcccatgcacggagtgccctgtcctgccggagccgctgtgtgcaaagttcctattgatggtccccccatagatatcggccgggtagcaggaccaccaatactcaatccaatagcaaatgagatttacttgaattttgaaagcagtactccttgcttagcggacaagcatttcaactacacctcgctcatcgcgtttcactgtaagagaggtgtgagcatgggaacgcctaagctgttaaggaccagcgagtgcgactttgtgttcgaatgggagactcctgtcgtctgtcctgatgaagtgaggatggatggctgtaccctgacagatgagcagctcctctacagcttcaacttgtccagcctttccacgagcacctttaaggtgactcgcgactcgcgcacctacagcgttggggtgtgcacctttgcagtcgggccagaacaaggaggctgtaaggacggaggagtctgtctgctctcaggcaccaagggggcatcctttggacggctgcaatcaatgaaactggattacaggcaccaggatgaagcggtcgttttaagttacgtgaatggtgatcgttgccctccagaaaccgatgacggcgtcccctgtgtcttccccttcatattcaatgggaagagctacgaggagtgcatcatagagagcagggcgaagctgtggtgtagcacaactgcggactacgacagagaccacgagtggggcttctgcagacactcaaacagctaccggacatccagcatcatatttaagtgtgatgaagatgaggacattgggaggccacaagtcttcagtgaagtgcgtgggtgtgatgtgacatttgagtggaaaacaaaagttgtctgccctccaaagaagttggagtgcaaattcgtccagaaacacaaaacctacgacctgcggctgctctcctctctcaccgggtcctggtccctggtccacaacggagtctcgtactatataaatctgtgccagaaaatatataaagggcccctgggctgctctgaaagggccagcatttgcagaaggaccacaactggtgacgtccaggtcctgggactcgttcacacgcagaagctgggtgtcataggtgacaaagttgttgtcacgtactccaaaggttatccgtgtggtggaaataagaccgcatcctccgtgatagaattgacctgtacaaagacggtgggcagacctgcattcaagaggtttgatatcgacagctgcacttactacttcagctgggactcccgggctgcctgcgccgtgaagcctcaggaggtgcagatggtgaatgggaccatcaccaaccctataaatggcaagagcttcagcctcggagatatttattttaagctgttcagagcctctggggacatgaggaccaatggggacaactacctgtatgagatccaactttcctccatcacaagctccagaaacccggcgtgctctggagccaacatatgccaggtgaagcccaacgatcagcacttcagtcggaaagttggaacctctgacaagaccaagtactaccttcaagacggcgatctcgatgtcgtgtttgcctcttcctctaagtgcggaaaggataagaccaagtctgtttcttccaccatcttcttccactgtgaccctctggtggaggacgggatccccgagttcagtcacgagactgccgactgccagtacctcttctcttggtacacctcagccgtgtgtcctctgggggtgggctttgacagcgagaatcccggggacgacgggcagatgcacaaggggctgtcagaacggagccaggcagtcggcgcggtgctcagcctgctgctggtggcgctcacctgctgcctgctggccctgttgctctacaagaaggagaggagggaaacagtgataagtaagctgaccacttgctgtaggagaagttccaacgtgtcctacaaatactcaaaggtgaataaggaagaagagacagatgagaatgaaacagagtggctgatggaagagatccagctgcctcctccacggcagggaaaggaagggcaggagaacggccatattaccaccaagtcagtgaaagccctcagctccctgcatggggatgaccaggacagtgaggatgaggttctgaccatcccagaggtgaaagttcactcgggcaggggagctggggcagagagctcccacccagtgagaaacgcacagagcaatgcccttcaggagcgtgaggacgatagggtggggctggtcaggggtgagaaggcgaggaaagggaagtccagctctgcacagcagaagacagtgagctccaccaagctggtgtccttccatgacgacagcgacgaggacctcttacacatctgactccgcagtgcctgcaggggagcacggagccgcgggacagccaagcacctccaaccaaataagacttccactcgatgatgcttctataattttgcctttaacagaaactttcaaaagggaagagtttttgtgatgggggagagggtgaaggaggtcaggccccactccttcctgattgtttacagtcattggaataaggcatggctcagatcggccacagggcggtaccttgtgcccagggttttgccccaagtcctcatttaaaagcataaggccggacgcatctcaaaacagagggctgcattcgaagaaacccttgctgctttagtcccgatagggtatttgaccccgatatattttagcattttaattctctccccctatttattgactttgacaattactcaggtttgagaaaaaggaaaaaaaaacagccaccgtttcttcctgccagcaggggtgtgatgtaccagtttgtccatcttgagatggtgaggctgtcagtgtatggggcagcttccggcgggatgttgaactggtcattaatgtgtcccctgagttggagctcattctgtctcttttctcttttgctttctgtttcttaagggcacacacacgtgcgtgcgagcacacacacacatacgtgcacagggtccccgagtgcctaggttttggagagtttgcctgttctatgcctttagtcaggaatggctgcacctttttgcatgatatcttcaagcctgggcgtacagagcacatttgtcagtatttttgccggctggtgaattcaaacaacctgcccaaagattgatttgtgtgtttgtgtgtgtgtgtgtgtgtgtgtgtgtgtgtgtgagtggagttgaggtgtcagagaaaatgaattttttccagatttggggtataggtctcatctcttcaggttctcatgataccacctttactgtgcttatttttttaagaaaaaagtgttgatcaaccattcgacctataagaagccttaatttgcacagtgtgtgacttacagaaactgcatgaaaaatcatgggccagagcctcggccctagcattgcacttggcctcatgctggagggaggctgggcgggtacagcgcggaggaggagggaggccaggcgggcatggcgtggaggaggagggaggccgggcggtcacagcatggaggaggagggaggcgctgctggtgttcttattctggcggcagcgcctttcctgccatgtttagtgaatgacttttctcgcattgtagaattgtatatagactctggtgttctattgctgagaagcaaaccgccctgcagcatccctcagcctgtaccggtttggctggcttgtttgatttcaacatgagtgtattttttaaaattgatttttctcttcatttttttttcaatcaactttactgtaatataaagtattcaacaatttcaataaaagataaattattaaaa

SEQ ID NO: 124 - DNA, 1820 bp, HOMO SAPIENS
agtgcgcctgcgcgcttgtggagctggtggcggcgctccgcaggggctcggctgttttccgcgcggcaggcgcggccatggcgcagctgggaaagctgctcaaggagcagaagtacgaccggcagctgaggttgtggggtgatcatgggcaagaggctttagaatctgctcatgtttgcctaataaatgcaacagccacaggaactgaaattcttaaaaacttggtactaccaggtattggttcgtttacaattattgatggaaatcaggtcagcggagaagatgctggaaacaatttcttccttcaaagaagcagtatcggcaagaaccgagctgaagctgccatggaattcttacaagaattaaatagcgatgtctctggaagttttgtggaagagagtccagaaaaccttctagacaatgatccctcatttttctgtaggtttactgttgtagttgcaactcagcttcctgaaagcacttcactacgcttagcagatgtcctctggaattcccagattcctcttttgatctgtaggacatatggactagttggttatatgaggatcattataaaagaacatccagtaatagaatctcatccagataatgcattagaggatctacgactagataagccatttcctgaactgagagaacattttcagtcctatgatttggatcatatggaaaaaaaggaccacagtcatactccatggattgtgatcatagctaaatatttagcacagtggtatagtgaaacaaatggacgaatacctaaaacgtataaagaaaaagaggacttcagagatttgattagacaaggaattctaaaaaatgaaaatggggctccagaagatgaagagaattttgaagaagctattaaaaatgtgaacacagcactaaatacaactcagatcccaagcagtattgaagatatatttaatgatgatcgctgcataaatatcaccaaacagactccatcattttggattttagctcgtgccttaaaggaatttgtggccaaagagggtcaaggaaatttacctgttcgaggcacaattcctgatatgattgcagattcaggcaaatatataaaactgcaaaacgtttaccgtgaaaaagcaaagaaagatgctgccgctgtgggtaatcatgttgccaaattgctgcagtccattggccaggcaccagagtccatttcagagaaagaattaaaattactctgcagcaattctgcatttcttcgagtggtaagatgtcgatccttagctgaagaatatggtttggatacaattaacaaggatgaaattatttctagcatggacaatccagataatgaaatagtgttgtacttaatgttacgggctgttgatagatttcataaacaacagggtagatatccaggagtatctaactatcaagttgaagaagatataggaaagttgaagtcttgtctcactggcttccttcaggaatatggtttatctgtaatggtgaaagatgattatgtccacgaattttgccgatatggagctgctgagccacataccattgctgcattcttggggggagctgctgctcaagaggtcatcaaaataatcaccaaacaatttgtaatttttaataatacttacatttacagtggcatgtcacaaacttcagcaactttccagttgtagagtaagcaagcaccttaagtagtgtgttaatgattgaaactgtaattgccttcgggttgtgctttagtctgtaaaattctaaaggagagctgctaaattgttttcttaataaacatttttctcatttgtaaaaaaaaa

SEQ ID NO: 125 - DNA, 10531 bp, HOMO SAPIENS
gggaggcggggcgggccgtaggcaaagggaggtggggaggcggtggccggcgactccccgcgccccgctcgccccccggcccttcccgcggtgctcggcctcgttcctttcctcctccgctccctccgtcttccatacccgccccgcgcggctttcggccggcgtgcctcgcgccctaacgggcggctggaggcgccaatcagcgggcggcagggtgccagccccggggctgcgccggcgaatcggcggggcccgcggcccagggtggcaggcgggtctacccgcgcggccgcggcggcggagaagcagctcgccagccagcagcccgccagccgccgggaggttcgatacaagaggctgttttcctagcgtggcttgctgcctttggtaagaacatgtcgtccatcttgccattcacgccgccagttgtgaagagactgctgggatggaagaagtcagctggtgggtctggaggagcaggcggaggagagcagaatgggcaggaagaaaagtggtgtgagaaagcagtgaaaagtctggtgaagaagctaaagaaaacaggacgattagatgagcttgagaaagccatcaccactcaaaactgtaatactaaatgtgttaccataccaagcacttgctctgaaatttggggactgagtacaccaaatacgatagatcagtgggatacaacaggcctttacagcttctctgaacaaaccaggtctcttgatggtcgtctccaggtatcccatcgaaaaggattgccacatgttatatattgccgattatggcgctggcctgatcttcacagtcatcatgaactcaaggcaattgaaaactgcgaatatgcttttaatcttaaaaaggatgaagtatgtgtaaacccttaccactatcagagagttgagacaccagttttgcctccagtattagtgccccgacacaccgagatcctaacagaacttccgcctctggatgactatactcactccattccagaaaacactaacttcccagcaggaattgagccacagagtaattatattccagaaacgccacctcctggatatatcagtgaagatggagaaacaagtgaccaacagttgaatcaaagtatggacacaggctctccagcagaactatctcctactactctttcccctgttaatcatagcttggatttacagccagttacttactcagaacctgcattttggtgttcgatagcatattatgaattaaatcagagggttggagaaaccttccatgcatcacagccctcactcactgtagatggctttacagacccatcaaattcagagaggttctgcttaggtttactctccaatgttaaccgaaatgccacggtagaaatgacaagaaggcatataggaagaggagtgcgcttatactacataggtggggaagtttttgctgagtgcctaagtgatagtgcaatctttgtgcagagccccaattgtaatcagagatatggctggcaccctgcaacagtgtgtaaaattccaccaggctgtaatctgaagatcttcaacaaccaggaatttgctgctcttctggctcagtctgttaatcagggttttgaagccgtctatcagctaactagaatgtgcaccataagaatgagttttgtgaaagggtggggagcagaataccgaaggcagacggtaacaagtactccttgctggattgaacttcatctgaatggacctctacagtggttggacaaagtattaactcagatgggatccccttcagtgcgttgctcaagcatgtcataaagcttcaccaatcaagtcccatgaaaagacttaatgtaacaactcttctgtcatagcattgtgtgtggtccctatggactgtttactatccaaaagttcaagagagaaaacagcacttgaggtctcatcaattaaagcaccttgtggaatctgtttcctatatttgaatattagatgggaaaattagtgtctagaaatactctcccattaaagaggaagagaagattttaaagacttaatgatgtcttattgggcataaaactgagtgtcccaaaggtttattaataacagtagtagttatgtgtacaggtaatgtatcatgatccagtatcacagtattgtgctgtttatatacatttttagtttgcatagatgaggtgtgtgtgtgcgctgcttcttgatctaggcaaacctttataaagttgcagtacctaatctgttattcccacttctctgttatttttgtgtgtcttttttaatatataatatatatcaagattttcaaattatttagaagcagattttcctgtagaaaaactaatttttctgccttttaccaaaaataaactcttgggggaagaaaagtggattaacttttgaaatccttgaccttaatgtgttcagtggggcttaaacagtcattctttttgtggttttttgtttttttttgtttttttttttaactgctaaatcttattataaggaaaccatactgaaaacctttccaagcctcttttttccattcccatttttgtcctcataatcaaaacagcataacatgacatcatcaccagtaatagttgcattgatactgctggcaccagttaattctgggatacagtaagaattcatatggagaaagtccctttgtcttatgcccaaatttcaacaggaataattggcttgtataatctagcagtctgttgatttatccttccacctcataaaaaatgcataggtggcagtataattattttcagggatatgctagaattacttccacatatttatccctttttaaaaaagctaatctataaataccgtttttccaaaggtattttacaatatttcaacagcagaccttctgctcttcgagtagtttgatttggtttagtaaccagattgcattatgaaatgggccttttgtaaatgtaattgtttctgcaaaatacctagaaaagtgatgctgaggtaggatcagcagatatgggccatctgtttttaaagtatgttgtattcagtttataaattgattgttattctacacataattatgaattcagaattttaaaaattgggggaaaagccatttatttagcaagttttttagcttataagttacctgcagtctgagctgttcttaactgatcctggttttgtgattgacaatatttcatgctctgtagtgagaggagatttccgaaactctgttgctagttcattctgcagcaaataattattatgtctgatgttgactcattgcagtttaaacatttcttcttgtttgcatcttagtagaaatggaaaataaccactcctggtcgtcttttcataaattttcatatttttgaagctgtctttggtacttgttctttgaaatcatatccacctgtctctataggtatcattttcaatactttcaacatttggtggttttctattgggtactccccattttcctatatttgtgtgtatatgtatgtgttcatgtaaatttggtatagtaattttttattcattcaacaaatatttattgttcacctgtttgtaccaggaacttttcttagtctttgggtaaaggtgaacaagacaactacagttcctgcctttgctgagacagcagttacactaacccttaattatcttacttgtctatgaaggagataaacagggtactgtactggagaataacagatgggatgcttcaggtaggacatcaaggaaagcctctaaggaaaggatgcatgagctaacacctgacattaaagaagcaagccaagtgaggagccaggggagataagcattcctggcaaagagaatagcatcaaatgcaaaaaggttcacactaaaggaaactcctgattaggtattaatgctttatacagaaacctctatacaaatccaaacttgaagatcagaatggttctacagttcataacattttgaaggtggccttattttgtgatagtctgcttcatgtgattctcactaacatatctccttcctcaacctttgctgtaaaaatttcatttgcaccacatcagtactacttaatttaacaagcttttgttgtgtaagctctcactgttttagtgccctgctgcttgcttccagactttgtgctgtccagtaattatgtcttccactacccatcttgtgagcagagtaaatgtcctaggtaataccactatcaggcctgtaggagatactcagtggagcctctgcccttctttttcttacttgagaacttgtaatggtgttagggaacagttgtaggggcagaaaacaactctgaaagtggtagaaggtcctgatcttggtggttactcttgcattactgtgttaggtcaagcagtgcctactatgctgtttcagtagtggagcgcatctctacagttctgatgcgatttttctgtacagtatgaaattgggactcaactctttgaaaacacctattgagcagttatacctgttgagcagtttacttcctggttgtaattacatttgtgtgaatgtgtttgatgctttttaacgagatgatgttttttgtattttatctactgtggcctgattttttttttgttttctgcccctccccccatttataggtgtggttttcatttttctaagtgatagaatcccctctttgttgaatttttgtctttatttaaattagcaacattacttaggatttattcttcacaatactgttaattttctaggaatgatgacctgagaaccgaatggccatgctttctatcacatttctaagatgagtaatattttttccagtaggttccacagagacaccttgggggctggcttaggggaggctgttggagttctcactgacttagtggcatatttattctgtactgaagaactgcatggggtttcttttggaaagagtttcattgctttaaaaagaagctcagaaagtctttataaccactggtcaacgattagaaaaatataactggatttaggcctaccttctggaataccgctgattgtgctctttttatcctactttaaagaagctttcatgattagatttgagctatatcagttataccgattataccttataatacacattcagttagtaaacatttattgatgcctgttgtttgcccagccactgtgatggatattgaataataaaaagatgactaggacggggccctgacccttgagctgtgcttggtcttgtagaggttgtgttttttttcctcaggacctgtcactttggcagaaggaaatctgcctaatttttcttgaaagctaaattttctttgtaagtttttacaaattgtttaatacctagttgtattttttaccttaagccacattgagttttgcttgatttgtctgtcttttaaacactgtcaaatgctttcccttttgttaaaattattttaatttcactttttttgtgcccttgtcaatttaagactaagactttgaaggtaaaacaaacaaacaaacatcagtcttagtctcttgctagttgaaatcaaataaaagaaaatatatacccagttggtttctctacctcttaaaagcttcccatatatacctttaagatccttctcttttttctttaactactaaataggttcagcatttattcagtgttagataccctcttcgtctgagggtggcgtaggtttatgttgggatataaagtaacacaagacaatcttcactgtacataaaatatgtcttcatgtacagtctttactttaaaagctgaacattccaatttgcgccttccctcccaagcccctgcccaccaagtatctctttagatatctagtctgtggacatgaacaatgaatacttttttcttactctgatcgaaggcattgatacttagacatatcaaacatttcttcctttcatatgctttactttgctaaatctattatattcattgcctgaattttattcttcctttctacctgacaacacacatccaggtggtacttgctggttatcctctttcttgttagccttgttttttgttttttttttttttttttgagagggagtctcgctctgttgcccaacctggagtgcagtggtgcgatcttggttcactgcaagctccgcctcccgggttcacgccatgcttctgcctcagcctcccaagtagctgggactacaggcgcccaccaccacactcggctaattttttgtatttttagtagagacggggtttcaccgtgttggccaggatggtctcgatctcctgacctcgtgatctgtccacctcggcttcccaaagtgctgggattacaggcatgagccaccgcgcccagcctagccatatttttatctgcatatatcagaatgtttctctcctttgaacttattaacaaaaaaggaacatgcttttcatacctagagtcctaatttcttcatcatgaaggttgctattcaaattgatcaatcattttaattttacaaatggctcaaaaattctgttcagtaaatgtctttgtgactggcaaatggcataaattatgtttaagattatgaacttttctgacagttgcagccaatgttttccctacgataccagatttccatcttggggcatattggattgttgtatttaagacagtcagaataatgatagtgtgtggtctccagaggtagtcagaatcctgctattgagttctttttatatcttccttttcaattttttattaccattttgtttgtttagactacactttgtagggattgaggggcaaattatctcttggagtggaattcctgtgttttgagccttacaaccaggaaatatgagctatactagatagcctcatgatagcatttacgataagaacttatctcgtgtgttcatgtaattttttgagtaggaactgttttatcttgaatattgtagctaactatatatagcagaactgcctcagtctttttaagaaggaaataaataatatatgtgtatgaatttatatatacatatacactcatagacaaacttaacagttggggtcattctaacagttaaaacaattgttccattgtttaaatctcagatcctggtaaaatgttcttaatttgtctgtgtacattttcctttcatggacagaccattggagtacattaattttcttaatctgccatttggcagttcatttaatataccattttttggcaacttggtaactaagaatcacagccaaaatttgttaacatcaaagaaagctctgccatataccccgttactaaattattatacatccagcagattctgggatgtactaacttagggttaactttgttgttgttgataatactagattgctccctctttaattcttcttctggtgcaaggttgctgcttaagttaccctgggaaatactactacaaggtcaaattttctagtatcttacagcctgattgaaggtgattcagatctttgctcaatataaatggattttccaagattctctgggccatccttgacccacaggtgatctcgctggagtatattaacttaacttcagtgccagttggtttggtgccatgagatccataatgaatccagaacttcaccattgcttagatataagagtcccttggaagaataatgccactgatgatgggggtcagaaggtgtattaactcaacatagagggcttttagatttttcttcaaaaaaatttcgagaaaagtattcttttaccctccaaacagttaacagctcttagtttctccaaatatgctctttgatttacttatttttaattaaagatggtaatttattgaacaatgaaatccgtaatatattgatttaaggacaaaagtgaagttttagaattataaaagtacttaaatattatatattttccatttcataattgttttcctttctctgtggctttaaagtttttgactattttacaatgttaatcactaggtaacttgccatatttctggttctatattaagttctatcctttataatgctgttattataaagctggtttttagcatttgtctgtagcaatagaaattttactaagtctctgttctcccagtaagttttttcttttctcagtaagtccctaagaaaacatttgtttgccactcttactattcccaatcttggattgttcgagctgaaaaaaaatttgatgagaaacaggaggatccttttctggtgaatataggttcctgctttaagaatgtggaaatccattgctttatataactaatatacacacagattaattaaaattgtgagaaataattcacacatgacaagtaggtaacatgcatgagttttgaatttttttaaaaacccaactgtttgacaaaatatagaacccaaattggtactttcttagaccagtgtaacctcacacctcagttttgcttttccaaccctgacttgaaaggcatatttgtatctttttattagtgatagtgaagctgtgacactaaccttttatacaaaagagtaaagaaagaaaaactacagcgattaagatgagaacagttctgcagttgttgaactagatcacagcattgtaggcagaataaaaaatgttcatatctgagaatattcctttcgccatcttttcccaaggccagacctcctggtggagcacagttaaaagtaacattctgggcctttgtaatcggagggctgtgtctccagctggcagcctttgttttaatatataatgcaggactgtggaaaacagttggcatagaatattttcacctaaaaaagaaagaaaagacatacaaaactggattaattgcaaaaagagaatacagtaaaataccatataactggacaaagctagaagaacctttagaagatttgtctgaaaacagatttcaagagtgagcttttatacactgctcactaatttgcttgattactaccaactcttcttaaagttaacacgtttaaggtatttctggacttcctagccttttagcaagcttagaggaactagccattagctagtgatgtaaaaatattttggggactgatgcccttaaaggttatgcccttgaaagttcttaccttttctctagtgatattaaggaacgagtgggtagtgttctcagggtgaccagctgccctaaagtgcctgggattgagggtttccctggatgcgggactttccctggatacaaaacttttagcagagttttgtatatatgtggatttttctgataagtagcacatcagaggccttaaccactgcccaaaagcgattctccattgagagtacatatcttgaacttaagaaattcatttgctctgatttttaatcttgtaaagtttttgctaaactcaaaacaagtcccaggcacaccagaaggagctgaccaccttaggtgttcttgtgatttatccttacttccctatgttgtcatagttgcttctaaactcagctgcactatggctgtcaacatttctgatacttattgggatatgtgccatccagtcatttagtactttgaatggaacatgagatttataacacaggtaatagctgaaggtaccagtatggtggtgagactcacacttagtgatccagctaaggtaactgatgttataatggaacagagaagaggccaactagatagctaagttcttctgaacctatgtgtatatgtaagtacaaatcatgcgtccttatggggttaaacttaatctgaaatttacatttttcatagtaaaaggaaaccaattgttgcagatttcttttcttgtgaggaaatacatggcctttgatgctctggcgtctactgcatttcccagtctgttctgctcgagaagccagaatgtgttgttaacatttttccgtgaatgttgtgttaaaatgattaaatgcatcagccaatggcaagtgaaggaattgggtgtcctgatgcagactgagcagtttctctcaattgtagcctcatactcataaggtgcttaccagctagaacattgagcacgtgaggtgagattttttttctctgatggcattaactttgtaatgcaatatgatggatgcagaccctgttcttgtttccctctggaagtccttagtggctgcatccttggtgcactgtgatggagatattaaatgtgttctttgtgagctttcgttctatgattgtcaaaagtacgatgtggttccttttttatttttattaaacaatgagctgaggctttattacagctggttttcaagttaaaattgttgaatactgatgtctttctcccacctacaccaaatattttagtctatttaaagtacaaaaaaagttctgcttaagaaaacattgcttacatgtcctgtgatttctggtcaatttttatatatatttgtgtgcatcatctgtatgtgctttcactttttaccttgtttgctcttacctgtgttaacagccctgtcaccgttgaaaggtggacagttttcctagcattaaaagaaagccatttgagttgtttaccatgtta

SEQ ID NO: 126 - DNA, 5704 bp, HOMO SAPIENS
gcgcgggcgtaggcggagcagcgcgcgccgcggtcagctgactgctgggctggcacgtgacttgttctgtgttcgcttgggtagaggaagccgtgaggccggagcttaggtcgggaagggatggatcgctgagccgatagcgtccgctaggctgtctgcctcggtacctgttactgctgctacttcctcgtttgacaccttcctggaatctctcttgatttttgaggaaatacctagtaacaaacatgactgagttctggcttatatctgctcctggggagaaaacctgtcagcaaacatgggagaaattgcatgcggcaacttcaaagaacaataatcttgctgtcacttccaagttcaatattcctgacttaaaggttggcacgttggatgtcttggttggcttgtcagatgaactggctaaactggatgcatttgtagaaggagtggttaagaaagtagctcaatacatggctgatgtattggaagatagcaaagacaaagttcaagagaatctgttggctaatggagtggacttggttacttatataacaaggttccagtgggacatggccaaatatccaatcaagcagtccctgaaaaatatttctgaaataattgccaagggagtaactcagattgataatgacctgaaatctcgagcatctgcatacaataacctgaaaggaaatcttcagaatttggaacgaaagaatgcaggaagtttgctaactagaagtctagcagaaattgtgaagaaggatgactttgttcttgattcagagtatctcgtcacattactggtagtagttcccaagttaaaccacaacgactggattaagcagtatgaaacactagccgaaatggtagttccaaggtctagcaatgttctttcagaggaccaagacagttacctgtgtaatgtcaccttgtttaggaaggcagttgatgacttcagacacaaagccagagaaaacaaattcattgttcgtgacttccagtataatgaagaggagatgaaagcagataaagaagaaatgaacaggctttctactgataagaaaaaacaatttggaccacttgtacggtggctgaaagtgaattttagtgaagcatttattgcatggattcacgtgaaagcattacgggttttcgttgagtctgttttaaggtatggcttgccagtgaacttccaagcaatgctacttcagcccaataagaaaactttgaagaaactgagagaagtattacatgaattgtataaacatctagacagcagtgcagcagctattattgatgctcctatggatattccaggtttaaacctgagtcaacaagaatactacccctatgtgtactacaagattgattgcaacttgctggaattcaagtgaaaatgggctcctcccccgacaatcctgtccttgtgtttgtgtgtgctaacagaaataagttgcagtatggtcgtacttttaactctagtatcctttgcttgcttcttacgccctttcctaggtgaattctcccacagtggtctgtatctcaacattttctttttaaaggaaaaaatatatatatatagtttctttttattgatcaggtctgtaaatgtgtactaaaaaaatcagagtttatttataaacaaaatagtttatttaaagagaaggtctcttccttattgatatcatggtatgcattaattccatttgttactattgtgcacaaaagccctgttcacaggggaatggtgtaaacatttatactgttttgttcactgtatttagtagacataactgttgaatagttactgaatcatgatgtaaagaatatgtgaccatcttcaggtatgggatttctgaacgtttcaaatttcaatcaatgagcactgtcaacacccacaggagagaataaaattacctgtgcaaaggtgtattgtggtgtgtgtaacttaagattacagttctgtttgagagttaaatgatgtcatagctcacttgctatgctgcttccaggattttgttatatgctgaggtgtaaccatttgtgttgtctgactttcgtatgatttaattgagccaaatttgggtcagaacacaaatttgaagatgacttttcagtatatgatgggtatttacatttgaacactagaattttaggtctctcaaataattaagaatagagccagttttgaataaagtctagcagaactatgcagctttagtcatttgttttgtctaagtctgtattttatgtgttgtcttcttaagatctataattttggcatttatgtcatttgtgacatagtctgaaaatagagacattgttggcctttaaaatctcagaaatgaatgacttaatttagtgtcctgaaagagcttttaaaagaggattttgtggcaatgtttctcttactacgtactcacaggtttgcaaatgggaaaaaagtttacatttcagtttaggggcatatctaagctatgctattccctttagaaaattagcctccaaaatcttttgtttcaaaatattatattatttcataaataatttcaagcaaatacagacatccacaatgtagaacatgagagaccccctccctcaatttccacctcccaagggaagtttatgtatttttctaggcccttttctatgtctttacatctctgtctcacacacacacacgtatacacacacacagtttatttttaataaaataggattataccacacacatcctgtcacttgcttttttgcttaagagtatatctaagagaatcctttgtgtcagtgaagctggagctacctcattcttttaactggctgcgtggcgttccattgagtgtctgtcatcatgtgtttagccgagtggatggatagtctgcttgtttttagtttttgctcttaacaaacactgctgcagtcagcatccttgcacagatttctttgtatacttgtattagtatttctgtaagatctgagaagtggaatttgtagggtcataggttatgtacacttaagtttttgacactcactgccaagtcatctgtcagaattctaaactaaagacatgtttggagtgtggatttatcttcagtttttctttggacaagaggaagctgtgaaagattttgctatcagaaaattttggttctttgtcttttgcacatgttctttgagtcttagtatctgtaacgtggcgctactctctctatcatgggggggcatgttttgacattaaattgacttttaagaaaaacatgtcactaacctgaagctcagccacacagtgacttttaaggttttatttagactttactgttgttctcatgagagtaggtacagactgcataaggtttagaatcccagcatatgtctgaaacgacgggactttcactgtgatttccaccagagaaattatagcagagtggctgagcatgtgctctgaggccaggccccagctctgctgctgacgagctgtgtggtcctgggcagagtggtctccgagttccagtccctcctctgtaaaatgggcatgattagagtgcccaccgcattagggatgttggggtgagtcagtgtgaccccacgtgcacagaaagtgctgcgagtggtgcatggtgagaggttgatgcaggtacttagcccttggggaacacaggtagttccttttcactgtgtttaatttgggaaaatccagatccacatcattgtagagtctgagggttagaaggaagtcattgtgtctaacataacaacagagcagtttgtgtcactgagctccagtctgtgctggattattgatattgttggtggcggtcaccattcctggaaagggactgtcccaagccacttaccttcccgaggagtctgctggttctccttgaggatagtgcttagataacagactcattaaacatttactgagtgtctgtcagggatcattcacatccacatcatcctcccggcccctccccgtgttgttcatggagggagtactggcggtccccattttcatgtatggagacttcaggtgaaagaagttaagtgaattctttgttgagtcacaaatcttgagccagtcagaatttgaacctaagatttttgactgctggttgtcacacttcccgccccacactcaactgttgtgtgaatgagccagacacattgcttaacctgagtccgagatggacaatggtataggaaagatattcggtatggagaatcagatgttaacttgtgttgctatttttgttttgttttgttttgttttgtttttgagacaaggtcttgctctgtcacccaggctagagtgcagtggcatgatcagggcttactgcagcctcaccctcgatttcctgggctcaagcaatcctcccacctcagcccccaagtagctgggcctacaggtgcgtgctaccacgcctggccaattttttaaattttagcacagatgaggtctcactatgttgcccgggctggtctcgaactcctgagctcaagggatcctcccgcctcagcctcccaaagtgctggtgttacaggcataagccaccacgcctggcctgtgttgctattatatttggcaggaacccagagtccagaacatttcatctatgatgggttagataatgtgtctagttgtttgcatgccaatttcagtagcctcagttattcaacctaggagatttttctacctctttactaccctgctgaagttgctcttcagcagaaaatctttgtggaacacattccacactttgaaatcttcgtggaacaaaagatatttgtggaaccaatctttgtggaacatattccagctttttgaatgagtgcatatccagtagtacctttaaagtaacactttgtacataacaaatactcagcaaatgtgaaactttatttgctcttacttcaaaattagtccaaaatgttggaaataaaatataagacattgatctagatatgaggtttttctccttcattctcagctgtcgaagaaatcaaagtagcatatgcacaaggttaaaaaccacatatacaaatactatagaacagcttataatgaaaaccttgcctgcctttataaaaaatgtgattatcttcttctgttaatgtcaataaaagatggtttgtcctagaaggtctataaatggtattatgttctggaggaaacctagcaaaaactttgctagtttagtacttgtctctaaattgatgttcacccatttcaatattgcacttattaatggtctttatttttctagcatagataacaattgattctttagattcatatatggaggtaattcttgctttctaaagaaaggaatatggcacattggaaccattttattcaccagtggatttacccttagagtatttttagatctgagctgatgacttgtgagagaaaaagggaacagagtaaagccatggaagccatgaacagtaagagactgccgcctggcatggtttcttcttctgcagaagatgaaactgaggagaaacaagacaacatccttcataccaggaatggtcaagataatgcaagaagaaaaaagctttcaaacaaatcagaaggcagtcaacaaacagaaagggggacattccttccctggcagttactcaaaactgaaattgcttattgtgtacaccggggcttgtacttggggaatttaataaaaatgctcattaccaagctcca

SEQ ID NO: 127 - DNA, 6952 bp, HOMO SAPIENS
ttccagttacagctatatcagagaatgagttaatctcctcagaaatcactaaatactactctgaggggcttagaaattaacaggttgtttatataattggccttaaatgaggtgagagtgaagagactagagccatctctggaaaacatcattatcccattccccgggaagctaccctctggaactcaagatttgaccatatctgttttgaggattcattatgaacaaagaagtctcccaggtgtgaagtttttcaacatgagtggcctcggggacagttcatccgaccctgctaacccagactcacataagaggaaaggatcgccatgtgacacactggcatcaagcacggaaaagaggcgcagggagcaagaaaataaatatttagaagaactagctgagttactgtctgccaacattagtgacattgacagcttgagtgtaaaaccagacaaatgcaagattttgaagaaaacagtcgatcagatacagctaatgaagagaatggaacaagagaaatcaacaactgatgacgatgtacagaaatcagacatctcatcaagtagtcaaggagtgatagaaaaggaatccttgggacctcttcttttggaggctttggatggatttttctttgttgtgaactgtgaagggagaattgtatttgtgtcagagaatgtaaccagctacttaggttacaatcaggaggaattaatgaatacgagcgtctacagcatactgcacgtgggggatcatgcagaatttgtgaagaatctgctaccaaaatcactagtaaatggagttccttggcctcaagaggcaacacgacgaaatagccatacctttaactgcaggatgctaattcaccctccagatgagccagggaccgagaaccaagaagcttgccagcgttatgaagtaatgcagtgtttcactgtgtcacagccaaaatcaattcaagaggatggagaagatttccagtcatgtctgatttgtattgcacggcgattacctcggcctccagctattacgggtgtagaatcctttatgaccaagcaagatactacaggtaaaatcatctctattgatactagttccctgagagctgctggcagaactggttgggaagatttagtgaggaagtgcatttatgcttttttccaacctcagggcagagaaccatcttatgccagacagctgttccaagaagtgatgactcgtggcactgcctccagcccctcctatagattcatattgaatgatgggacaatgcttagcgcccacaccaagtgtaaactttgctaccctcaaagtccagacatgcaacctttcatcatgggaattcatatcatcgacagggagcacagtgggctttctcctcaagatgacactaattctggaatgtcaattccccgagtaaatccctcggtcaatcctagtatctctccagctcatggtgtggctcgttcatccacattgccaccatccaacagcaacatggtatccaccagaataaaccgccagcagagctcagaccttcatagcagcagtcatagtaattctagcaacagccaaggaagtttcggatgctcacccggaagtcagattgtagccaatgttgccttaaaccaaggacaggccagttcacagagcagtaatccctctttaaacctcaataattctcctatggaaggtacaggaatatccctagcacagttcatgtctccaaggagacaggttacttctggattggcaacaaggcccaggatgccaaacaattcctttcctcctaatatttcgacattaagctctcccgttggcatgacaagtagtgcctgtaataataataaccgatcttattcaaacatcccagtaacatctttacagggtatgaatgaaggacccaataactccgttggcttctctgccagttctccagtcctcaggcagatgagctcacagaattcacctagcagattaaatatacaaccagcaaaagctgagtccaaagataacaaagagattgcctcaattttaaatgaaatgattcaatctgacaacagctctagtgatggcaaacctctggattcagggcttctgcataacaatgacagactttcagatggagacagtaaatactctcaaaccagtcacaaactagtgcagcttttgacaacaactgccgaacagcagttacggcatgctgatatagacacaagctgcaaagatgtcctgtcttgcacaggcacttccaactctgcctctgctaactcttcaggaggttcttgtccctcttctcatagctcattgacagaacggcataaaattctacaccggctcttacaggagggtagcccctcagatatcaccactttgtctgtcgagcctgataaaaaggacagtgcatctacttctgtgtcagtgactggacaggtacaaggaaactccagtataaaactagaactggatgcttcaaagaaaaaagaatcaaaagaccatcagctcctacgctatcttttagataaagatgagaaagatttaagatcaactccaaacctgagcctggatgatgtaaaggtgaaagtggaaaagaaagaacagatggatccatgtaatacaaacccaaccccaatgaccaaacccactcctgaggaaataaaactggaggcccagagccagtttacagctgaccttgaccagtttgatcagttactgcccacgctggagaaggcagcacagttgccaggcttatgtgagacagacaggatggatggtgcggtcaccagtgtaaccatcaaatcggagatcctgccagcttcacttcagtccgccactgccagacccacttccaggctaaatagattacctgagctggaattggaagcaattgataaccaatttggacaaccaggaacaggcgatcagattccatggacaaataatacagtgacagctataaatcagagtaaatcagaagaccagtgtattagctcacaattagatgagcttctctgtccacccacaacagtagaagggagaaatgatgagaaggctcttcttgaacagctggtatccttccttagtggcaaagatgaaactgagctagctgaactagacagagctctgggaattgacaaacttgttcaggggggtggattagatgtattatcagagagatttccaccacaacaagcaacgccacctttgatcatggaagaaagacccaacctttattcccagccttactcttctccttctcctactgccaatctccctagccctttccaaggcatggtcaggcaaaaaccttcactggggacgatgcctgttcaagtaacacctccccgaggtgctttttcacctggcatgggcatgcagcccaggcaaactctaaacagacctccggctgcacctaaccagcttcgacttcaactacagcagcgattacagggacaacagcagttgatacaccaaaatcggcaagctatcttaaaccagtttgcagcaactgctcctgttggcatcaatatgagatcaggcatgcaacagcaaattacacctcagccacccctgaatgctcaaatgttggcacaacgtcagcgggaactgtacagtcaacagcaccgacagaggcagctaatacagcagcaaagagccatgcttatgaggcagcaaagctttgggaacaacctccctccctcatctggactaccagttcaaatggggaacccccgtcttcctcagggtgctccacagcaattcccctatccaccaaactatggtacaaatccaggaaccccacctgcttctaccagcccgttttcacaactagcagcaaatcctgaagcatccttggccaaccgcaacagcatggtgagcagaggcatgacaggaaacataggaggacagtttggcactggaatcaatcctcagatgcagcagaatgtcttccagtatccaggagcaggaatggttccccaaggtgaggccaactttgctccatctctaagccctgggagctccatggtgccgatgccaatccctcctcctcagagttctcttctccagcaaactccacctgcctccgggtatcagtcaccagacatgaaggcctggcagcaaggagcgataggaaacaacaatgtgttcagtcaagctgtccagaaccagcccacgcctgcacagccaggagtatacaacaacatgagcatcaccgtttccatggcaggtggaaatacgaatgttcagaacatgaacccaatgatggcccagatgcagatgagctctttgcagatgccaggaatgaacactgtgtgccctgagcagataaatgatcccgcactgagacacacaggcctctactgcaaccagctctcatccactgaccttctcaaaacagaagcagatggaacccaggacaagaagacagaagagttcttctctgtggtgactacagactagaggaatgctctacaggtgcaacaggttcaggtgtttgctgacgtccagtgtacagtgaatctggtaggcggggacccttacctgaaccagcctggtccactgggaactcaaaagcccacgtcaggaccacagaccccccaggcccagcagaagagcctccttcagcagctactgactgaataaccacttttaaaggaatgtgaaatttaaataatagacatacagagatatacaaatatattatatatttttctgagatttttgatatctcaatctgcagccattcttcaggtcgtagcatttggagcaaaaaaaaaaaaaaaaaaaaaaaaaggagtttgcttttgtcgggagattgaaagatgtttttgtttctttctttgtaaaggccttggatattgaaaaaataccaaggcagaacagttggacaatctatttcttgagccaaatttaattattcttatttttgtaatcagtcattggcttcttatctggatgaaggcttttggaggagaaccaaaacgacaagttccaagaagaagatgaagctccgcctccgccgcttagtcccaaccctgcccaggaagaagggcccgtggggctttgcctgtgcccgtccaccaaaggctgtcatgtgtctcgaaatcagcagccctccccatcccaatcccaggcagcttgtgtgtacaatcagcttctctagcaactctgtatctgttggcttcaagagaatattttgcctccacatatgtaccccttctcctttttttaaagatggatttaaaccaagatgcctccaggaaagaggacgaaatgagtatattcacagaggaatccaaaaaatacagtttgggggaaaatgcaataatttttgatgagatgggtgaaggacaagaagtgagttgtgtcaattattgtagatacaattttctgattaaatctggaaaaataaaaggcagcctgttttttctgcttttattgtattaacagctgaggtagctaaagttatttaaaataaaattaaatttatgatccaagtagcttatttttccctttaaatctcattgtaaatatatttgatttcttgtagaaattgatttccttctgtttaattttatgcttttattatactcttgatttttctaaatttgtgtgtgaaatataacattgattgaattgcagttacatttggttagtaatatttcattattttaataactgtgatgtcatgtatggatttactttggggttcaaatcaaaatgtcactgccagaaagagctgttccagctgatctagagcatactgccctagagtgtccctgggatcatctgaacagaagtgcacaggctacttgtacagagaaaaaattaatactcaaaggaaatcttcattttttagattgactttgggaatttgaattttcatcagtgcaaatataaatttctctatcctgctctgaggctaattggtaccatattttccctttgtgtcttgtgactctgccacatcccatctcatcctggcctctgagtcaagaacccagtgaactgactttctagttctagaagttccgctgcaaggccaggaaagcttgagaaaggtattgtggaagaagcaaaggtagacccccatcactcacctttgtctgcatccctgggcctgtgaatgatgacagcacctgacattctgcaccagctacctctgcctccatggcagagaaaaggccataagaacagtggaagaggagcatggactcagacttcaaggaagaagccatttccccaggtccttccttctgcatctcaccacccctagttacaaataactccattgaacagcatctattcagaaactatgccgaataaaaagattggtggaagggctcatgtggttagcaactatgaaacagaaataggacactcagttacaaacattatctcctttagtttttcagaaaatgcatccctgatttcattcatttccagcttgaaagccagccatattactctagtccctaccaaactgctctagaaggtcatttccattttgtttgtgatatttagacgcgcagacttcaggaagttcacctttaacttcagcattccagatgaagtttcctgactcagtgcttttgcataaggaactagaaaaaaaaagtaaggaaaattggagatgctaacatcctcccccatcccaactgcaccttaaaatatgcatgtcaccttcaaggttttataattgcactgtttgttttatgtatgtacagattaaaattattgctacatttgaggaaaataaaattgcttgcttctatgtaattcctgtcattccacaggaaattcacttttccagctactgaatagaatttgtttaacaacctcatgggttgcctcttcatttacagggaagaaatgaaatgtacatctgcagaaattgccaaagcccaaattaacgagtattataaaaggataataaagcatccctgaagccaaa

SEQ ID NO: 128 - DNA, 3223 bp, HOMO SAPIENS
agtgccacaggcaaccctgcacgtgacgcttgcggaggaaggggagagagaggcgcgcgggagggcgtctagggaatcgaggtgccggctgctccttcctcacaatttgcccagacaggcggtgggtgggaatgcctcacttcagtttgaagagggtccggatccaaaggggttaaaacgagcgacccccgatccccgaccacacttcccgcctccctaaaacgcacaccccgctagccatgggcagccgcgaccacctgttcaaagtgctggtggtgggggacgccgcagtgggcaagacgtcgctggtgcagcgatattcccaggacagcttcagcaaacactacaagtccacggtgggagtggattttgctctgaaggttctccagtggtctgactacgagatagtgcggcttcagctgtgggatattgcagggcaggagcgcttcacctctatgacacgattgtattatcgggatgcctctgcctgtgttattatgtttgacgttaccaatgccactaccttcagcaacagccagaggtggaaacaggacctagacagcaagctcacactacccaatggagagccggtgccctgcctgctcttggccaacaagtgtgatctgtccccttgggcagtgagccgggaccagattgaccggttcagtaaagagaacggtttcacaggttggacagaaacatcagtcaaggagaacaaaaatattaatgaggctatgagagtcctcattgaaaagatgatgagaaattccacagaagatatcatgtctttgtccacccaaggggactacatcaatctacaaaccaagtcctccagctggtcctgctgctagtagtgtttggcttattttccatcccagttctgggaggtcttttaagtctcttccctttggttgcccacctgacaattttattaagtacatttgaattgtctcctgactactgtccagtaaggaggcccattgtcacttagaaaagacacctggaacccatgtgcatttctgcatctcctggattagcctttcacatgttgctggctcacattagtgccagttagtgccttcggtgtaagatcttctcatcagccctcaatttgtgatccggaattttatgagaaggattagaaatcagcacctgcgttttagagatcataattctcacctacttctgagcttatttttccatttgatattcattgatatcatgacttccaattgagaggaaaatgagatcaaatgtcatttcccaaatttcttgtaggccgttgtttcagattctttctgtcttggaatgtaaacatctgattctggaatgcagaaggagggggtctgggcatctgtggatttttggctactagaagtgtcccagaagtcactgtatttttgaaacttctaacgtcataattaagtttctcttgtcttggcatcaagaatagtcaagttttttggccgggcatggtggctcatgcctgtaatcccagcacttggggaggccaaggcaggcggatcacatgaggccaggaattcgagaccaacctggtcagcatggcaaaaccccgtctctactaaaagtacaaaaattagccaggcgtgatggcacgtgtctgtaatcccagctactctggagactgaggtgggagaatcgcttgagactgggaggcagaggttgcagtgaaccgagatcatgccaccgcacttcagcctgggtgacagagaaggactccgtctcaaaaaaaaaagaaaaaagaatagtcatttttaaactacctatctcatgcaatgaaagcattttcttccacaaagagcttaatcctcatgataggattgcctagtgtctcccatttgcaggtttctgggttgatgtcttaatgcataatactgcaagtgacatcagctggctgtgatgcttcgaaataggtctgctcctcacagctttgggaatctgaatggaagaagaaaagagagaagttaacaacctccactggggcaactttgtgaacacgtaggcacttagtcataggaaacatattatgtgcaggtcctagcctgggggaggaaagtagatagacagaaaatcattaggtaatttaagtactaaattgggcagggctttttagtatcaaatcactactagaccatttaatttgttaaattatctctaggatggtgatttataacctacccaaagttatcgatattcttactaaactctgaggcctgaagttctgtgatagaccttaaataagtgtcctaagtcagtggttcccaaatctggctggtcgggaatacctgggaagtttgttaaaattttttaaaaatgttttaagatttttgggtcctgagccagccgtggtggctcacacctgtaatcccagcactttgggaggctgaggcaggtggatcgcctgaggtcaggagttcaagatcaacctggccaacatactgaaaccccgtctctactaaaaataagaaaaattagctgggcgtggtggcgggcacctgtaatcccagctacttgggagactgaggcaggagaatcgcttgaacctgggagttagaggttgcagtgagctgagatcacaccattgcgcttcagcctgggcaacaagagtgaaactccatctccaaaaaaaaaaaacaaaaagaaaaagatttttgggtcccgacctcaaacctactgaatcagaatttctagggatgaagcctaggaatgtgttgttgttttcagagcttccctggtgattgtgataagcctggtttggaaaccattgctggagaactttgtaaagatacagagacccagaccttttgtatttacatttaaatacaaatacaaatcctgggtttctatatattctgttagcttttcaggtgattctgctacacagacgttgaaaaccactgccctaagaaagagatcagaggccacatatcagagagaaaagggaccaaaccttcggtggtttgttgtgtgtcgttttaatgccaattattttaacttgcacagtcttctgaaaccttgtattaatagttctcttttgtattaccattttcaggtagggttttgatcactatgattctgaagataatagtgaaatagtgaatttcattgatatgaagagataattgattttcattcattggtttgaacacctgcaaaatcacaaataaatgagaactaagtcttgtaaaaaaaaaaaaaaaaa

SEQ ID NO: 129 - DNA, 899 bp, HOMO SAPIENS
agcctacgcacgaaagtgactaggaggaaggatattataaagtgatgcaaacagaaattccaccagcctccatgtatcatcatgtgtcataactcagtcaagctcagtgagcattctcagcacattgcctcaacagcttcaaggtgagccagctcaagactttgctctccaccaggcagaagatgacagactgtgaatttggatatatttacaggctggctcaggactatctgcagtgcgtcctacagataccacaacctggatcaggtccaagcaaaacgtccagagtgctacaaaatgttgcgttctcagtccaaaaagaagtggaaaagaatctgaagtcatgcttggacaatgttaatgttgtgtccgtagacactgccagaacactattcaaccaagtgatggaaaaggagtttgaagacggcatcattaactggggaagaattgtaaccatatttgcatttgaaggtattctcatcaagaaacttctacgacagcaaattgccccggatgtggatacctataaggagatttcatattttgttgcggagttcataatgaataacacaggagaatggataaggcaaaacggaggctgggaaaatggctttgtaaagaagtttgaacctaaatctggctggatgacttttctagaagttacaggaaagatctgtgaaatgctatctctcctgaagcaatactgttgaccagaaaggacactccatattgtgaaaccggcctaatttttctgactgatatggaaacgattgccaacacatacttctacttttaaataaacaactttgatgatgtaacttgaccttccagagttatggaaattttgtccccatgtaatgaataaattgtatgtatttttctctataaaaaaaaaaaaa

SEQ ID NO: 130 - DNA, 2884 bp, HOMO SAPIENS
tcgattctcaagagggtttcattggtctcaacctggccccccaggcaacccacccctgattggacagtctcatcaagaaggttggtcaagagctcaagtgtttctgagaatctgggtgatttataagaaacccttagctgaatgcagggtggggagaacgaaagacaaaagcatcttttttcagaagggaaactgaaagaaagaggggaagagtattaaagaccatttctggctgggcagggcactctcagcagctcaactgcccagcgtgaccagtggccacctctgcagtgtcttccacaacctggtcttgactcgtctgctgaacaaatcctctgacctcaggccggctgtgaacgtagttcctgagagatagcaaacatgcccaacagtgagcccgcatctctgctggagctgttcaacagcatcgccacacaaggggagctcgtaaggtccctcaaagcgggaaatgcgtcaaaggatgaaattgattctgcagtaaagatgttggtgtcattaaaaatgagctacaaagctgccgcgggggaggattacaaggctgactgtcctccagggaacccagcacctaccagtaatcatggcccagatgccacagaagctgaagaggattttgtggacccatggacagtacagacaagcagtgcaaaaggcatagactacgataagctcattgttcggtttggaagtagtaaaattgacaaagagctaataaaccgaatagagagagccaccggccaaagaccacaccacttcctgcgcagaggcatcttcttctcacacagagatatgaatcaggttcttgatgcctatgaaaataagaagccattttatctgtacacgggccggggcccctcttctgaagcaatgcatgtaggtcacctcattccatttattttcacaaagtggctccaggatgtatttaacgtgcccttggtcatccagatgacggatgacgagaagtatctgtggaaggacctgaccctggaccaggcctatagctatgctgtggagaatgccaaggacatcatcgcctgtggctttgacatcaacaagactttcatattctctgacctggactacatggggatgagctcaggtttctacaaaaatgtggtgaagattcaaaagcatgttaccttcaaccaagtgaaaggcattttcggcttcactgacagcgactgcattgggaagatcagttttcctgccatccaggctgctccctccttcagcaactcattcccacagatcttccgagacaggacggatatccagtgccttatcccatgtgccattgaccaggatccttactttagaatgacaagggacgtcgcccccaggatcggctatcctaaaccagccctgctgcactccaccttcttcccagccctgcagggcgcccagaccaaaatgagtgccagcgaccccaactcctccatcttcctcaccgacacggccaagcagatcaaaaccaaggtcaataagcatgcgttttctggagggagagacaccatcgaggagcacaggcagtttgggggcaactgtgatgtggacgtgtctttcatgtacctgaccttcttcctcgaggacgacgacaagctcgagcagatcaggaaggattacaccagcggagccatgctcaccggtgagctcaagaaggcactcatagaggttctgcagcccttgatcgcagagcaccaggcccggcgcaaggaggtcacggatgagatagtgaaagagttcatgactccccggaagctgtccttcgactttcagtagcactcgttttacatatgcttataaaagaagtgatgtatcagtaatgtatcaataatcccagcccagtcaaagcaccgccacctgtaggcttctgtctcatggtaattactgggcctggcctctgtaagcctgtgtatgttatcaatactgtttcttcctgtgagttccattatttctatctcttatgggcaaagcattgtgggtaattggtgctggctaacattgcatggtcggatagagaagtccagctgtgagtctctccccaaagcagccccacagtggagcctttggctggaagtccatgggccaccctgttcttgtccatggaggactccgagggttccaagtatactcttaagacccactctgtttaaaaatatatattctatgtatgcgtatatggaattgaaatgtcattattgtaacctagaaagtgctttgaaatattgatgtggggaggtttattgagcacaagatgtatttcagcccatgccccctcccaaaaagaaattgataagtaaaagcttcgttatacatttgactaagaaatcacccagctttaaagctgcttttaacaatgaagattgaacagagttcagcaattttgattaaattaagacttgggggtgaaactttccagtttactgaactccagaccatgcatgtagtccactccagaaatcatgctcgcttcccttggcacaccagtgttctcctgccaaatgaccctagaccctctgtcctgcagagtcagggtggcttttcccctgactgtgtccgatgccaaggagtcctggcctccgcagatgcttcattttgacccttggctgcagtggaagtcagcacagagcagtgccctggctgtgtccctggacgggtggacttagctagggagaaagtcgaggcagcagccctcgaggccctcacagatgtctaggcaggcctcatttcatcacgcagcatgtgcaggcctggaagagcaaagccaaatctcagggaagtccttggttgatgtatctgggtctcctctggagcactctgccctcctgtcacccagtagagtaaataaacttccttggctcctgct

SEQ ID NO: 131 - DNA, 1450 bp, HOMO SAPIENS
ataagctgggtcccgatgccgcgagcggaatctcggcgctcccggaagtggcctgaaggcggcgcgccagtcccgagcagtgctcgctcctgctcggggcgctgcggccccgggcgtcgccatgaccagtgagctggacatcttcgtggggaacacgacccttatcgacgaggacgtgtatcgcctctggctcgatggttactcggtgaccgacgcggtggccctgcgggtgcgctcgggaatcctggagcagactggcgccacggcagcggtgctgcagagcgacaccatggaccattaccgcaccttccacatgctcgagcggctgctgcatgcgccgcccaagctactgcaccagctcatcttccagattccgccctcccggcaggcactactcatcgagaggtactatgcctttgatgaggcctttgttcgggaggtgctgggcaagaagctgtccaaaggcaccaagaaagacctggatgacatcagcaccaaaacaggcatcaccctcaagagctgccggagacagtttgacaactttaaacgggtcttcaaggtggtagaggaaatgcggggctccctggtggacaatattcagcaacacttcctcctctctgaccggttggccagggactatgcagccatcgtcttctttgctaacaaccgctttgagacagggaagaaaaaactgcagtatctgagcttcggtgactttgccttctgcgctgagctcatgatccaaaactggacccttggagccgtcggtgaggcccccactgacccagactcacagatggatgacatggacatggacttagacaaggaatttctccaggacttgaaggagctcaaggtgctagtggctgacaaggaccttctggacctgcacaagagcctggtgtgcactgctctccggggaaagctgggcgtcttctctgagatggaagccaacttcaagaacctgtcccgggggctggtgaacgtggccgccaagctgacccacaataaagatgtcagagacctgtttgtggacctcgtggagaagtttgtggaaccctgccgctccgaccactggccactcagcgacgtgcggttcttcctgaatcagtattcagcgtctgtccactccctcgatggcttccgacaccaggccctctgggaccgctacatgggcaccctccgcggctgcctcctgcgcctgtatcatgactgaggtgcctcccaacgctccgcccacgctgacaataaagttgctctgagtttggagactggtcctcgctccggggagcaagtggggggcgtgcagatgtgcctgtgtctgtctctgagcacctggtgtccgtgtacaaggatggatgtgtacagtggctccttgggaactgagacatatctcagggaatggtgtctgtgctcagcccatccaccagaagagtctgctcacaagcca

SEQ ID NO: 132 - DNA, 2608 bp, HOMO SAPIENS
gcggagctccgcatccaaccccgggccgcggccaacttctctggactggaccagaagtttctagccggccagttgctacctccctttatctcctccttcccctctggcagcgaggaggctatttccagacacttccacccctctctggccacgtcacccccgcctttaattcataaaggtgcccggcgccggcttcccggacacgtcggcggcggagaggggcccacggcggcggcccggccagagactcggcgcccggagccagcgccccgcacccgcgccccagcgggcagaccccaacccagcatgagcgccgccacccactcgcccatgatgcaggtggcgtccggcaacggtgaccgcgaccctttgccccccggatgggagatcaagatcgacccgcagaccggctggcccttcttcgtggaccacaacagccgcaccactacgtggaacgacccgcgcgtgccctctgagggccccaaggagactccatcctctgccaatggcccttcccgggagggctctaggctgccgcctgctagggaaggccaccctgtgtacccccagctccgaccaggctacattcccattcctgtgctccatgaaggcgctgagaaccggcaggtgcaccctttccatgtctatccccagcctgggatgcagcgattccgaactgaggcggcagcagcggctcctcagaggtcccagtcacctctgcggggcatgccagaaaccactcagccagataaacagtgtggacaggtggcagcggcggcggcagcccagcccccagcctcccacggacctgagcggtcccagtctccagctgcctctgactgctcatcctcatcctcctcggccagcctgccttcctccggcaggagcagcctgggcagtcaccagctcccgcgggggtacatctccattccggtgatacacgagcagaacgttacccggccagcagcccagccctccttccaccaagcccagaagacgcactacccagcgcagcagggggagtaccagacccaccagcctgtgtaccacaagatccagggggatgactgggagccccggcccctgcgggcggcatccccgttcaggtcatctgtccagggtgcatcgagccgggagggctcaccagccaggagcagcacgccactccactccccctcgcccatccgtgtgcacaccgtggtcgacaggcctcagcagcccatgacccatcgagaaactgcacctgtttcccagcctgaaaacaaaccagaaagtaagccaggcccagttggaccagaactccctcctggacacatcccaattcaagtgatccgcaaagaggtggattctaaacctgtttcccagaagcccccacctccctctgagaaggtagaggtgaaagttccccctgctccagttccttgtcctcctcccagccctggcccttctgctgtcccctcttcccccaagagtgtggctacagaagagagggcagcccccagcactgcccctgcagaagctacacctccaaaaccaggagaagccgaggctcccccaaaacatccaggagtgctgaaagtggaagccatcctggagaaggtacaggggctggagcaggctgtagacaactttgaaggcaagaagactgacaaaaagtacctgatgatcgaagagtatttgaccaaagagctgctggccctggattcagtggaccccgagggacgagccgatgtgcgtcaggccaggagagacggtgtcaggaaggttcagaccatcttggaaaaacttgaacagaaagccattgatgtcccaggtcaagtccaggtctatgaactccagcccagcaaccttgaagcagatcagccactgcaggcaatcatggagatgggtgccgtggcagcagacaagggcaagaaaaatgctggaaatgcagaagatccccacacagaaacccagcagccagaagccacagcagcagcgacttcaaaccccagcagcatgacagacacccctggtaacccagcagcaccgtagcctctgccctgtaaaaatcagactcggaaccgatgtgtgctttagggaattttaagttgcatgcatttcagagactttaagtcagttggtttttattagctgcttggtatgcagtaacttgggtggaggcaaaacactaataaaagggctaaaaaggaaaatgatgcttttcttctatattcttactctgtacaaataaagaagttgcttgttgtttgagaagtttaaccccgttgcttgttgttctgcagccctgtctacttgggcacccccaccacctgttagctgtggttgtgcactgtcttttgtagctctggactggaggggtagatggggagtcaattacccatcacataaatatgaaacatttatcagaaatgttgccattttaatgagatgattttcttcatctcataattaaaatacctgactttagagagagtaaaatgtgccaggagccataggaatatctgtatgttggatgactttaatgctacattttaaaaaaagaaaataaagtaataatataactcaaaaaaaaaaaaaaaaaaaaaaaaaaaaaaaaaaaaaaaaa

SEQ ID NO: 133 - DNA, 10914 bp, HOMO SAPIENS
cgccccccctgcgcccgcccctcccccttcgctttccttctccccccgcctcggctccgacatgaggggccggcggggcaggccgcccaagcagcccgcggctcccgctgcggagcgctgcgccccggccccgccgccaccgccgccgccgcccacgtccggacccatcggggggctccgctcgcggcaccgcggcagcagccggggcaggtgggccgccgcccaggctgaggtggcgcccaagacgcggctgagctcgcccagggggggcagcagtagccggaggaagccgccgccgccgccgccggccccccccagcaccagcgccccgggccggggggggcgaggaggcgggggcggcaggacggggggcgggggcggcggcggccacctggcccggaccaccgcggcccggagggccgtcaacaaagtggtgtacgatgaccacgagagcgaggaggaggaggaagaggaggacatggtctccgaggaggaggaggaggaggacggcgacgccgaggagacccaggattctgaggacgacgaggaggatgagatggaagaggacgacgatgactccgattatccggaggagatggaagacgacgacgacgacgccagttactgcacggaaagcagcttcaggagccatagtacctacagcagcactccaggtaggcgaaaaccaagagtacatcggcctcgttctcctatattggaagaaaaagacatcccgccccttgaatttcccaagtcctctgaggatttaatggtgcctaatgagcatataatgaatgtcattgccatttacgaggtactgcggaactttggcactgttttgagattatctccttttcgctttgaggacttttgtgcagctctggtgagccaagagcagtgcacactcatggcagagatgcatgttgtgcttttgaaagcagttctgcgtgaagaagacacttccaatactacctttggacctgctgatctgaaagatagcgttaattccacactgtatttcatagatgggatgacgtggccagaggtgctgcgggtgtactgtgagagtgataaggagtaccatcacgttcttccttaccaagaggcagaggactacccatatggaccagtagagaacaagatcaaagttctacagtttctagtcgatcagtttcttacaacaaatattgctcgagaggaattgatgtctgaaggggtgatacagtatgatgaccattgtagggtttgtcacaaacttggggatttgctttgctgtgagacatgttcagcagtataccatttggaatgtgtgaagccacctcttgaggaggtgccagaggacgagtggcagtgtgaagtctgtgtagcacacaaggtgcctggtgtgactgactgtgttgctgaaatccaaaaaaataaaccatatattcgacatgaacctattggatatgatagaagtcggaggaaatactggttcttgaaccgaagactcataatagaagaagatacagaaaatgaaaatgaaaagaaaatttggtattacagcacaaaggtccaacttgcagaattaattgactgtctagacaaagattattgggaagcagaactctgcaaaattctagaagaaatgcgtgaagaaatccaccgacacatggacataactgaagacctgaccaataaggctcggggcagtaacaaatcctttctggcggcagctaatgaagaaattttggaatccataagagccaaaaagggagacattgataatgttaaaagcccagaagaaacagaaaaagacaagaatgagactgagaatgactctaaagatgctgagaaaaacagagaagaatttgaagaccagtcccttgaaaaagacagtgacgacaaaacaccagatgatgaccctgagcaaggaaaatctgaggtaggtgatttcaaatcggagaagtccaacggggagctaagtgaatctcctggagctggaaaaggagcatctggctcaactcgaatcatcaccagattgcggaatccagatagcaaacttagtcagctgaagagccagcaggtggcagccgctgcacatgaagcaaataaattatttaaggagggcaaagaggtactggtagttaactctcaaggagaaatttcacggttgagcaccaaaaaggaagtgatcatgaaaggaaatatcaacaattattttaaattgggtcaagaagggaagtatcgcgtctaccacaatcaatactccaccaattcatttgctttgaataagcaccagcacagagaagaccatgataagagaaggcatcttgcacataagttctgtctgactccagcaggagagttcaaatggaacggttctgtccatgggtccaaagttcttaccatatctactctgagactgactatcacccaattagaaaacaacatcccttcatcctttcttcatcccaactgggcatcacatagggcaaattggatcaaggcagttcagatgtgtagcaaacccagagaatttgcattggctttagccattttggagtgtgcagttaaaccagttgtgatgctaccaatatggcgagaatctttaggacataccaggttacaccggatgacatcaattgaaagagaagaaaaggagaaagtcaaaaaaaaagagaagaaacaggaagaagaagaaacgatgcagcaagcgacatgggtaaaatacacatttccagttaagcatcaggtttggaaacaaaaaggtgaagagtacagagtgacaggatatggtggttggagctggattagtaaaactcatgtttataggtttgttcctaaattgccaggcaatactaatgtgaattacagaaagtcgttagaaggaaccaaaaataatatggatgaaaatatggatgagtcagataaaagaaaatgttcacgaagtccaaaaaaaataaaaatagagcctgattctgaaaaagatgaggtaaaaggttcagatgctgcaaaaggagcagaccaaaatgaaatggatatctcaaagattactgagaagaaggaccaagatgtgaaggagctcttagattctgacagtgataaaccctgcaaggaagaaccaatggaagtagacgatgacatgaaaacagagtcacatgtaaattgtcaggagagttctcaagtagatgtggtcaatgttagtgagggttttcatctaaggactagttacaaaaagaaaacaaaatcatccaaactagatggacttcttgaaaggagaattaaacagtttacactggaagaaaaacagcgactcgaaaaaatcaagttggagggtggaattaagggtataggaaagacttctacaaattcttcaaaaaatctctctgaatcaccagtaataacgaaagcaaaagaagggtgtcagagtgactcgatgagacaagaacagagcccaaatgcaaataatgatcaacctgaggacttgattcagggatgttcagaaagtgattcctcagttcttagaatgagtgatcctagtcataccacaaacaaactttatccaaaagatcgagtgttagatgatgtctccattcggagcccagaaacaaaatgtccgaaacaaaattccattgaaaatgacatagaagaaaaagtctctgaccttgccagtagaggccaggaacccagtaagagtaaaacaaaaggaaatgattttttcatcgatgactctaaactagccagtgcagatgatattggtactttgatctgtaagaacaaaaaaccgctcatacaggaggaaagtgacaccattgtttcttcttccaagagtgctttacattcatcagtgcctaaaagtaccaatgacagagatgccacacctctgtcaagagcaatggactttgaaggaaaactgggatgtgactctgaatctaatagcactttggaaaatagttctgataccgtgtctattcaggatagcagtgaagaagatatgattgttcagaatagcaatgaaagcatttctgaacagttcagaactcgagaacaagatgttgaagtcttggagccgttaaagtgtgagttggtttctggtgagtccactggaaactgtgaggacaggctgccggtcaaggggactgaagcaaatggtaaaaaaccaagtcagcagaagaaattagaggagagaccagttaataaatgtagtgatcaaataaagctaaaaaataccactgacaaaaagaataatgaaaatcgagagtctgaaaagaaaggacagagaacaagtacatttcaaataaatggaaaagataataaacccaaaatatatttgaaaggtgaatgcttgaaagaaatttctgagagtagagtagtaagtggtaatgttgaaccaaaggttaataatataaataaaataatccctgagaatgatattaaatcattgactgttaaagaatctgctataaggccattcattaatggtgatgtcatcatggaagattttaatgaaagaaacagctccgaaacaaaatcgcatttgctgagttcttcagatgctgaaggtaactaccgagatagccttgagaccctgccatcaaccaaagagtctgacagtacacagacgaccacaccctcagcatcttgtccagaaagcaattcagttaatcaggtagaagatatggaaatagaaacctcagaagttaagaaagttacttcatcacctattacttctgaagaggaatctaatctcagtaatgactttattgatgaaaatggtctgcccatcaacaaaaatgaaaatgtcaatggagaatctaaaagaaaaaccgtcatcacagaagtcaccacgatgacctccacagtggccacagaatcaaaaactgtgatcaaggtagaaaaaggcgataagcaaactgtggtttcttccacagaaaattgtgcaaaatccactgtcacaaccaccactacaacagtgaccaagctttccacaccctccacaggcggcagtgtggacatcatctctgtaaaggagcagagcaaaaccgtggtcaccacgacagtgacagactccctgaccaccacgggaggcacactggttacatctatgactgtgagcaaagagtattccacacgagacaaagtgaaactgatgaaattttcaagaccaaagaagactcgttcaggtacagctctgccatcctatagaaaatttgttaccaagagcagcaagaagagcatttttgttttgcctaatgatgacttaaaaaagttggcccgaaaaggaggaatccgagaggtcccttattttaattacaatgcaaaacctgctttggatatatggccatatccttctcctagaccgacctttggcatcacttggaggtatagacttcagacagtaaagtccttagctggagtgagcctgatgttacggttactgtgggcaagtttgagatgggatgatatggcggccaaggctcctccaggaggagggactacacggacagaaacatccgaaactgaaatcacaacaacagaaataattaagaggagagatgttggtccttatggcattcgatctgaatattgtatcaggaaaatcatttgtcccattggagttccagaaacaccaaaagaaacgcctacacctcagaggaaaggccttcgatcaagtgcactgcggccaaagagaccagaaacgcccaagcaaactggccctgttattattgaaacctgggtagcagaagaagaactggaattgtgggagatcagggcatttgctgagagagtggagaaagaaaaggcacaagcagttgagcaacaggctaagaaacgactggagcagcagaagccgacagtgattgcaacttccactacttccccaacaagcagtacaaccagcaccatctctccagcacagaaggttatggtggcccccataagtggctcagttacaactggaaccaaaatggtactaactactaaagttggatctccagctacagtaacattccaacaaaacaagaactttcatcaaacctttgctacatgggttaagcaaggccagtcaaattcaggcgttgttcaagtacagcagaaagtcctgggtatcattccatcaagtacaggtaccagtcagcaaacctttacttcattccagcccaggacagcaacagtcacaattaggcccaatacctcaggctctggaggaaccacaagcaattcacaagtaatcacagggcctcagattcgccctggtatgaccgtgattagaacaccactccaacagtcaacactaggaaaggcaattattcgaacacctgtgatggtacagccaggtgctcctcagcaagtgatgactcaaatcatcagggggcagcctgtctccactgcagtctccgcccctaacacggtttcctcaacacctgggcagaaaagcttaacttcagcaacgtccacttcaaatatacagtcttcagcctcacaaccccctcgcccccaacaaggacaagtgaagctcaccatggctcaacttactcagttaacacagggccacggtggcaatcaaggtttgacagtagtaattcaaggacaaggtcaaactactggacagttgcagttgatacctcaaggggtgactgtactcccaggcccaggccagcagctaatgcaagctgcaatgccaaatggtactgttcagcgattcctctttaccccattggcaacaacagccaccacagccagcaccaccaccaccactgtttccacgacagcagcaggtacaggtgaacaaaggcagagtaaactgtcaccccagatgcaggtacatcaagacaaaaccctgccaccagctcagtcatcaagtgtgggtccagcagaagcccagccacagactgctcagccttcagctcagccccagccccaaacccagccccagtccccagctcagcctgaagttcagactcagcctgaagttcagacccaaacaactgtttcatcccatgtcccttctgaagcacaacccacccacgcacagtcatccaagccccaagttgcagcacagtctcagcctcaaagtaatgtccaaggacagtctcctgttcgtgtccaaagtccatcacagactcgaatacgtccatcaactccatcccaactgtctcctggacaacaatcccaggttcagactacaacctcacaaccgattccaattcaaccacatacatctcttcagataccttcccaaggccagccacagtcacaaccccaggtacagtcttcaactcaaactctttcatcaggacaaactttaaatcaagttactgtttcatccccatcccgtcctcagctacaaatacagcagccacagccccaagtcattgctgtgcctcagctgcaacaacaagtccaggttctctctcagatccagtcacaggttgtggctcagatacaggctcagcaaagtggtgtgccccagcaaatcaaactccagttacctatccaaattcagcaaagcagtgctgtgcagactcaccagattcagaatgtggttacagtgcaggcagccagtgtgcaagagcagttgcaaagggttcagcaactcagggatcagcagcaaaagaagaaacagcaacagatagaaattaagcgtgaacacaccctccaagcttctaatcaaagtgaaatcattcagaaacaggtggtgatgaagcataatgctgtaatagaacatttaaaacagaaaaagagcatgactccagctgaaagagaagagaatcaaagaatgattgtctgtaaccaggtgatgaagtatattttggataagatagataaagaagaaaaacaggcagcaaaaaaacggaagcgtgaagagagtgtggagcagaaacgtagcaagcagaatgccactaagctgtcagctctgctcttcaagcacaaagagcagctcagagccgagatcctgaagaagagagcactcctggacaaggatctgcaaattgaagtgcaggaagagctgaagagagacctgaaaattaagaaagaaaaagacctgatgcagttggctcaggccacagcagtagctgcaccctgccccccagtgacaccagctcctccagcccctccagcccctccaccttcacctccccctccacctgctgtgcaacacacaggccttctgtccacgcccaccttacctgctgcttcccagaagaggaagcgggaagaggaaaaagactccagctcaaagtccaagaaaaagaaaatgatctctactacctcaaaggaaactaagaaggacacaaagctttactgtatctgtaaaacgccttatgatgaatctaaattttatattggctgtgatcggtgtcagaattggtaccatgggcgctgcgttggcatcttgcaaagtgaggcagagctcattgatgagtatgtctgtccacagtgccagtcaacagaggatgccatgacagtgctcacgccactaacagagaaggattatgaggggttgaagagggtgctccgttccttacaggcccataagatggcctggcctttccttgaaccagtagaccctaatgatgcaccagattattatggtgttattaaggaacctatggaccttgccaccatggaagaaagagtacaaagacgatattatgaaaagctgacggaatttgtggcagatatgaccaaaatttttgataactgtcgttactacaatccaagtgactccccattttaccagtgtgcagaagttctcgaatcattctttgtacagaaattgaaaggcttcaaagctagcaggtctcataacaacaaactgcagtctacagcttcttaaagttcagcgtgttaacctaacataaaacacagcaagaatctggttgtctgaactattttaaattaaggagccagatgtttttagtcaggctatcctgacaagacttgacctaaacttcgtttttattggtcataacagtccaattatattcttggccaattttgtccaacggacaagaaaaaagcaaagtcaacgacaccattatcttgtcaagatcagatggttttactattgtggcagaagcgagaaaactttgtttattgaaaaaaaaagaaaaagaaagcaagaaaaaaagatactatggggtcaagtgtaactccatggaaatgccacgtctgctcttcagtgaagaagctggtttagagtctcacagaaaacttttgactgtatttatttattgttgcaaaaaagacgcttttttattgctgccctcatttgtcagctaattattttttcttataaaatccagccccggttacatataatcatctgtatcttatcatgattcctgtaggtaaaagtacaagacgacctctagatgtcttttctttctatgaaaggagctgctatgtacacatgtgcacacacacacaactgggaatcaacaatgagtttattgttcatggtagattaaaattaagcttgcataaaggttgggctaagtggtcctggactacagactctgttgccttgaatataacagtacaatttgtcaattactctgcaccaggctaaaatgagtaaaatctatttgaaggtatcttgtttgtaaacatttgtcagattctaatttttttcttttgtattaaaattcaactatggatgtatatgaaacaaaataaatggagataatttttctcccacagacagaggtgtctttgaatgtgcgctaatgattatctgtaagcctttgtggggagggaggcctgcaaggtcatgaaaggcagaagagtctaattgtgcctggatttctccaggacagcagtggcccctcgttttatcattcccagtccattgtcatcacgtcagagaaaaatcttcaggggtgctaatcctgttgcatcagttgatcatactaacgagaacggtaatgcgacaagatacacattgccttcatctgtacattctgtgataccaggcaaattaccaattacacacagctacttatattttatgaagggcattttttagatgacctcatcctctgtgttatttgttgattgggtttgttttctgtttgttggtttgtttgtttcttccacgtaaggaaaagtagtgtaaacagtagcgagaaaatggaaaccacagaggaagatgtattttgcatgtttttcctttcagtgttcttacacgttgtatcactgcattgtggtaatagcttctataaaatctgccatagttggattatgcagctttgcaaaaatttttactagattttgcactaactcatattagctttgtcctaccaacttctggaatttatctaattattgtttttcaaagtttctttccttttaatgtttccctgctatgcaaaacctttcccagacctcagtttcttaaaagaaagatgttgctacagttcccgattctttcttattacaggctcaggtgtacaggttattctgggttaattttatctaatgaagcccattcctttttgtacataaagatgtcacttaaacttatgcttacaaactaaagactaatcgctcaatatgaaaacatgaaaaaatttttgcttaaagtattaagatggaagtagttaaatatgggttattttgtccttttacttttttaaaaaatgttacatattgtatgcactgtgctgatgcaagaattctacattttaatgagttataaaattattctgcatctcatcacgtcacagtatttctgtactatttattcatatatataaatatatatgggcttaatcatttaaaatttgttgcagcaagaactttcctacctgtaggcaatagattgctatgtttttaacaaattgtggcaaattctaaacagcaattcttttgtacgtaataggacatttcatcctagaaaaataaagtaatgtttttgacattgga

SEQ ID NO: 134 - DNA, 1053 bp, HOMO SAPIENS
gaaacccggaagtggaactctgagccattcagcgtttgggtgaagacggaggcgggttctacagagacgtaggctgtcagggagtgtttatttcgcgtccgcttctgtttctccgcgcccctgtgctgccccgactcacatactcgtccagaaccggcctcagcctctccgcgcagaagtttcccggagccatggccgagtactcctacgtgaagtctaccaagctcgtgctcaagggaaccaagacgaagagtaagaagaaaaagagcaaagataagaaaagaaaaagagaagaagatgaagaaacccagcttgatattgttggaatctggtggacagtaacaaactttggtgaaatttcaggaaccatagccattgaaatggataagggaacctatatacatgcactcgacaatggtctttttaccctgggagctccacacaaagaagttgatgagggccctagtcctccagagcagtttacggctgtcaaattatctgattccagaatcgccctgaagtctggctatggaaaatatcttggtataaattcagatggacttgttgttgggcgttcagatgcaattggaccaagagaacaatgggaaccagtctttcaaaatgggaaaatggctttgttggcctcaaatagctgctttattagatgcaatgaagcaggggacatagaagcaaaaagtaaaacagcaggagaagaagaaatgatcaagattagatcctgtgctgaaagagaaaccaagaaaaaagatgacattccagaagaagacaaaggaaatgtaaaacaatgtgaaatcaattatgtaaagaaatttcagagcttccaagaccacaaacttaaaataagtaaagaagacagtaaaattcttaaaaaggctcggaaagatggatttttgcatgagacgcttctggacaggagagccaaattgaaagccgacagatactgcaagtgactgggatttttgtttctgccttatctttctgtgtttttttctgaataaaatattcagaggaaatgcttttacagaaaaaaaaaaa

SEQ ID NO: 135 - DNA, 11184 bp, HOMO SAPIENS
aactgctagtggctgagtccctggcggggcgcggcggtggaaggtgtcgcgtacgggcttcccgagctgacgtggcttgaattgggaggggggcagctggagcctcaggcggcagcgcttctagaaatgctgagccgattatcaggattagcaaatgttgttttgcatgaattatcaggagatgatgacactgatcagaatatgagggctcccctagaccctgaattacaccaagaatctgacatggaatttaataatactacacaagaagatgttcaggagcgcctggcttatgcagagcaattggtggtggagctaaaagatattattagacagaaggatgttcaactgcagcagaaagatgaagctctacaggaagagagaaaagctgctgataacaaaattaaaaaactaaaacttcatgcgaaggccaaattaacttctttgaataaatacatagaagaaatgaaagcacaaggagggactgttctgcctacagaacctcagtcagaggagcaactttccaagcatgacaagagttctacagaggaagagatggaaatagaaaagataaaacataagctccaggagaaggaggaactaatcagcactttgcaagcccagcttactcaggcacaggcagaacaacctgcacagagttctacagagatggaagaatttgtaatgatgaagcaacagctccaggagaaggaagaattcattagcactttacaagcccagctcagccagacacaggcagagcaagctgcacagcaggtggtccgagagaaagatgcccgctttgaaacacaagttcgtcttcatgaagatgagcttcttcagttagtaacccaggcagatgtggaaacagagatgcaacagaaattgagggtgctgcaaaggaagcttgaggaacacgaagaatccttggtgggccgtgctcaggtcgttgacttgctgcaacaggagctgactgctgctgagcagagaaaccagattctctctcagcagttacagcagatggaagctgagcataatactttgaggaacactgtggaaacagaaagagaggagtccaagattctactggaaaagatggaacttgaagtggcagagagaaaattatccttccataatctgcaggaagaaatgcatcatcttttagaacagtttgagcaagcaggccaagcccaggctgaactagagtctcggtatagtgctttggagcagaagcacaaagcagaaatggaagagaagacctctcatattttgagtcttcaaaagactggacaagagctgcagtctgcctgtgatgctctaaaggatcaaaattcaaagcttctccaagataagaatgaacaggcagttcagtcagcccagaccattcagcaactggaagatcagctccagcaaaaatccaaagaaattagccaatttctaaatagactgcccttgcaacaacatgaaacagcatctcagacttctttcccagatgtttataatgagggcacacaggcagtcactgaggagaatattgcttctttgcagaagagagtggtagaactagagaatgaaaagggagccttgctccttagttctatagagctggaggagctgaaagctgagaatgaaaaactgtcttctcagattactctcctagaggctcagaatagaactggggaggcagacagagaagtcagtgagatcagcattgttgatattgccaacaagaggagctcttctgctgaggaaagtggacaagatgttctagaaaacacattttctcagaaacataaagaattatcagttttattgttggaaatgaaagaagctcaagaggaaattgcatttcttaaattacagctccagggaaaaagggctgaggaagcagatcatgaggtccttgaccagaaagaaatgaaacagatggagggtgagggaatagctccaattaaaatgaaagtatttcttgaagatacagggcaagattttcccttaatgccaaatgaagagagcagtcttccagcagttgaaaaagaacaggcgagcactgaacatcaaagtagaacatctgaggaaatatctttaaatgatgctggagtagaattgaaatcaacaaagcaggatggtgataaatccctttctgctgtaccagatattggtcagtgtcatcaggatgagttggaaaggttaaaaagtcaaattttggagctcgagctaaactttcataaagcacaagaaatctatgagaaaaatttagatgagaaagctaaggaaattagcaacctaaaccagttgattgaggagtttaagaaaaatgctgacaacaacagcagtgcattcactgctttgtctgaagaaagagaccagcttctctctcaggtgaaggaacttagcatggtaacagaattgagggctcaggtaaagcaactggaaatgaaccttgcagaagcagaaaggcaaagaagacttgattatgaaagccaaactgcccatgacaacctgctcactgaacagatccatagtctcagcatagaagccaaatctaaagatgtgaaaattgaagttttacagaatgaactggatgatgtgcagcttcagttttctgagcagagtaccctgataagaagcctgcaaagccagctgcaaaataaggaaagtgaagtgcttgagggggcagaacgtgtaaggcatatctcaagtaaagtggaagaactgtcccaggctctttcacagaaggaacttgaaataacaaaaatggatcagctcttactagagaaaaagagagatgtggaaaccctccaacaaaccatcgaggagaaggatcaacaagtgacagaaatcagctttagtatgactgagaaaatggttcagcttaatgaagagaagttttctcttggggttgaaattaagactcttaaagaacagctaaatttattatccagagctgaggaagcaaaaaaagagcaggtggaagaagataatgaagtttcttctggccttaaacaaaattatgatgagatgagcccagcaggacaaataagtaaggaagaacttcagcatgaatttgaccttctgaagaaagaaaatgagcagagaaagagaaagctccaggcagctcttattaacagaaaggagcttctgcaaagagtcagtagattggaagaagaattagccaacttgaaagatgaatctaagaaagaaatcccactcagtgagactgagaggggagaagtggaagaagataaagaaaacaaagaatactcagaaaaatgtgtgacttctaagtgccaagaaatagaaatttatttaaaacagacaatatctgagaaagaagtggaactacagcatataaggaaggatttggaagaaaagctggcagctgaagagcaattccaggctctggtcaaacagatgaatcagaccttgcaagataaaacaaaccaaatagatttgctccaagcagaaatcagtgaaaaccaagcaattatccagaagttaatcacaagtaacacggatgcaagtgatggggactccgtagcacttgtaaaggaaacagtggtgataagtccaccttgtacaggtagtagtgaacactggaaaccagaactagaagaaaagatactggcccttgaaaaagaaaaggagcaacttcaaaagaagctacaggaagccttaacctcccgcaaggcaattcttaaaaaggcacaggagaaagaaagacatctcagggaggagctaaagcaacagaaagatgactataatcgcttgcaagaacagtttgatgagcaaagcaaggaaaatgagaatattggagaccagctaaggcaactccagattcaagtaagggaatccatagacggaaaactcccaagcacagaccagcaggaatcgtgttcttccactccaggtttagaagaacctttattcaaagccacagaacagcatcacactcaacctgttttagagtccaacttgtgcccagactggccttctcattctgaagatgcgagtgctctgcagggcggaacttctgttgcccagattaaggcccagctgaaggaaatagaggctgagaaagtagagttagaattgaaagttagttctacaacaagtgagcttactaaaaaatcagaagaggtatttcagttacaagagcagataaataaacagggtttagaaatcgagagtctaaagacagtatcccatgaagctgaagtccatgccgaaagcctgcagcagaaattggaaagcagccaactacaaattgctggcctagaacatctaagagaattgcaacctaaactggatgaactgcaaaaactcataagcaaaaaggaagaagacgttagctacctttctggacaacttagtgagaaagaagcagctctcactaaaatacagacagagataatagaacaagaagatttaattaaggctctgcatacacagctagaaatgcaagccaaagagcatgatgagaggataaagcagctacaggtggaactttgtgaaatgaagcaaaaaccagaagagattggagaagaaagtagagcaaagcaacaaatacaaaggaaactgcaagctgcccttatttcccgaaaagaagcactaaaagaaaacaaaagtctccaagaggaattgtctttggccagaggtaccattgaacgtctcaccaagtctctggcagatgtggaaagccaagtttctgctcaaaataaagaaaaagatacggtcttaggaaggttagctcttcttcaagaagaaagagacaaactcattacagaaatggacaggtctttattggaaaatcagagtctcagcagctcctgtgaaagtctaaaactagctctagagggtcttactgaagacaaggaaaagttagtgaaggaaattgaatctttgaaatcttctaagattgcagaaagtactgagtggcaagagaaacacaaggagctacaaaaagagtatgaaattcttctgcagtcctatgagaatgttagtaatgaagcagaaaggattcagcatgtggtggaagctgtgaggcaagagaaacaagaactgtatggcaagttaagaagcacagaggcaaacaagaaggagacagaaaagcagttgcaggaagctgagcaagaaatggaggaaatgaaagaaaagatgagaaagtttgctaaatctaaacagcagaaaatcctagagctggaagaagagaatgaccggcttagggcagaggtgcaccctgcaggagatacagctaaagagtgtatggaaacacttctttcttccaatgccagcatgaaggaagaacttgaaagggtcaaaatggagtatgaaaccctttctaagaagtttcagtctttaatgtctgagaaagactctctaagtgaagaggttcaagatttaaagcatcagatagaaggtaatgtatctaaacaagctaacctagaggccaccgagaaacatgataaccaaacgaatgtcactgaagagggaacacagtctataccaggtgagactgaagagcaagactctctgagtatgagcacaagacctacatgttcagaatcggttccatcagcgaagagtgccaaccctgctgtaagtaaggatttcagctcacatgatgaaattaataactacctacagcagattgatcagctcaaagaaagaattgctggattagaggaggagaagcagaaaaacaaggaatttagccagactttagaaaatgagaaaaataccttactgagtcagatatcaacaaaggatggtgaactaaaaatgcttcaggaggaagtaaccaaaatgaacctgttaaatcagcaaatccaagaagaactctccagagttaccaaactaaaggagacagcagaagaagagaaagatgatttggaagagaggcttatgaatcaattagcagaacttaatggaagcattgggaattactgtcaggatgttacagatgcccaaataaaaaatgagctattggaatctgaaatgaagaaccttaaaaagtgtgtgagtgaattggaagaagaaaagcagcagttagtcaaggaaaaaactaaggtggaatcagaaatacgaaaggaatatttggagaaaatacaaggtgctcagaaagaacccggaaataaaagccatgcaaaggaacttcaggaactgttaaaagaaaaacaacaagaagtaaagcagctacagaaggactgcatcaggtatcaagagaaaattagtgctctggagagaactgttaaagctctagaatttgttcaaactgaatctcaaaaagatttggaaataaccaaagaaaatctggctcaagcagttgaacaccgcaaaaaggcacaagcagaattagctagcttcaaagtcctgctagatgacactcaaagtgaagcagcaagggtcctagcagacaatctcaagttgaaaaaggaacttcagtcaaataaagaatcagttaaaagccagatgaaacaaaaggatgaagatcttgagcgaagactggaacaggcagaagagaagcacctgaaagagaagaagaatatgcaagagaaactggatgctttgcgcagagaaaaagtccacttggaagagacaattggagagattcaggttactttgaacaagaaagacaaggaagttcagcaacttcaggaaaacttggacagtactgtgacccagcttgcagcctttactaagagcatgtcttccctccaggatgatcgtgacagggtgatagatgaagctaagaaatgggagaggaagtttagtgatgcgattcaaagcaaagaagaagaaattagactcaaagaagataattgcagtgttctaaaggatcaacttagacagatgtccatccatatggaagaattaaagattaacatttccaggcttgaacatgacaagcagatttgggagtccaaggcccagacagaggtccagcttcagcagaaggtctgtgatactctacagggggaaaacaaagaacttttgtcccagctagaagagacacgccacctataccacagttctcagaatgaattagctaagttggaatcagaacttaagagtctcaaagaccagttgactgatttaagtaactctttagaaaaatgtaaggaacaaaaaggaaacttggaagggatcataaggcagcaagaggctgatattcaaaattctaagttcagttatgaacaactggagactgatcttcaggcctccagagaactgaccagtaggctgcatgaagaaataaatatgaaagagcaaaagattataagcctgctttctggcaaggaagaggcaatccaagtagctattgctgaactgcgtcagcaacatgataaagaaattaaagagctggaaaacctgctgtcccaggaggaagaggagaatattgttttagaagaggagaacaaaaaggctgttgataaaaccaatcagcttatggaaacactgaaaaccatcaaaaaggaaaacattcagcaaaaggcacagttggattcctttgttaaatccatgtcttctctccaaaatgatcgagaccgcatagtgggtgactatcaacagctggaagagcgacatctctctataatcttggaaaaagaccaactcatccaagaggctgctgcagagaataataagcttaaagaagaaatacgaggcttgagaagtcatatggatgatctcaattctgagaatgccaagctagatgcagaactgatccaatatagagaagacctgaaccaagtgataacaataaaggacagccaacaaaagcagcttcttgaagttcaacttcagcaaaataaggagctggaaaataaatatgctaaattagaagaaaagctgaaggaatctgaggaagcaaatgaggatctgcggaggtcctttaatgccctacaagaagagaaacaagatttatctaaagagattgagagtttgaaagtatctatatcccagctaacaagacaagtaacagccttgcaagaagaaggtactttaggactctatcatgcccagttaaaagtaaaagaagaagaggtacacaggttaagtgctttgttttcctcctctcaaaagagaattgcagaactggaagaagaattggtttgtgttcaaaaggaagctgccaagaaggtaggtgaaattgaagataaactgaagaaagaattaaagcatcttcatcatgatgcagggataatgagaaatgaaactgaaacagcagaagagagagtggcagagctagcaagagatttggtggagatggaacagaaattactcatggtcaccaaagaaaataaaggtctcacagcacaaattcagtcttttggaaggtctatgagttccttgcaaaatagtagagatcatgccaatgaggaacttgatgaactgaaaaggaaatatgatgccagtctgaaggaattggcacagttgaaagaacagggactcttaaacagagagagagatgctcttctttctgaaaccgccttttcaatgaactccactgaggagaatagcttgtctcaccttgagaaacttaaccaacagctcctatccaaagatgagcaattgcttcacttgtcctcacaactagaagattcttataaccaagtgcagtccttttccaaggctatggccagtctgcagaatgagagagatcacctgtggaatgagctggagaaatttcgaaagtcagaggaagggaagcagaggtctgcagctcagccttccaccagcccagctgaagtacagagtttaaaaaaagctatgtcttcactccaaaatgacagagacagactactgaaggaattgaagaatctgcagcagcaatacttacagattaatcaagagatcactgagttacatccactgaaggctcaacttcaggagtatcaagataagacaaaagcatttcagattatgcaagaagagctcaggcaggaaaacctctcctggcagcatgagctgcatcagctcaggatggagaagagttcctgggaaatacatgagaggagaatgaaggaacagtaccttatggctatctcagataaagatcagcagctcagtcatctgcagaatcttataagggaattgaggtcttcttcctcccagactcagcctctcaaagtgcaataccaaagacaggcatccccagagacatcagcttccccagatgggtcacaaaatctggtttatgagacagaacttctcaggacccagctcaatgacagcttaaaggaaattcaccaaaaggagttaagaattcagcaactgaacagcaacttctctcagctactggaagagaaaaacaccctttccattcagctctgcgataccagtcagagtcttcgtgagaaccagcagcactatggtgaccttttaaatcactgtgcagtcttggagaagcaggttcaagagctgcaggcggggccactaaatatagatgttgctccaggagctccccaggaaaagaatggagttcacagaaagagtgaccctgaggaactaagggaaccgcagcaaagcttttctgaagctcagcagcagctatgcaacaccagacaggaagtgaatgaattaaggaagctgctggaagaagaacgagaccaaagagtggctgctgagaatgctctctctgtggccgaggagcagatcagacggttagagcacagtgaatgggactcttcccggactcctatcattggctcctgtggcactcaggagcaggcactgttaatagatcttacaagcaacagttgtcgaaggacccggagtggcgttggatggaagcgagtcctgcgttcactctgtcattcacggacccgagtgccacttctagcagccatctactttctaatgattcatgtcctgctcattctgtgttttacgggccatctatagacttagttgttactctttggaccactcccctcaaaacttggaattctctcacctctaacatcagaacatcaattccagtggaacagtcttcccatttacaggtcttctctccaactcttcacggaaagtgcctgcaaaaacagaggtggatacgaggacaggttggagctgcagggactggcgagtctgctttcttctactgccctgagcctgaacgcttctgcttaatctgagaatcacatttggtttgttgagcctaatatttgttgagattttgcaggaccctgatcttttgtggtcctgtaaaagatactgaggaatgtctttcagccaagccaagaggatggtttcaataaacctaataatctgaagttcagtatcattttgattgataactttctttgccttgtttgcctgtattttctcctgtttcagggggaaggtggctctgccataaacagagttcagggaaatgaacatgtcacctcataggacatctgatttaggtctcttgcagaatagggtggtgaaagctgaaggaactccctaggggttttagctgttagatcacatgggaggacagcatcttcttccctgccaatttcagatataattggagggagaatttcaggtcttagactataaggatagaatccctttgcttttgcccttgatcacatgtatactaaggtattaagtggcccaagtctttcctttcaccaaagggcagggagaagtgtctatggacagcagggttccaattcttgtcattccaggaatatctgaatattcctggaatgtggaccctgagacagtgctcaggggccactgggagccaatattaggcattgactctcagccaggagtctgactggtctaacaccacactgcaactcctgacctcttgaagtactaagctactttgctgttagtgacagttattacagtttctcagccccattgtctctgccctctgtggcaatggaaggagaatatagagaagacaaaattaaatatagatagacctgagaaggacagccaggatagaattccatttgtgcctattccctgcctcccctcccctcccccatcctaccagttggttattttctcattgcatacgtgatgtgttcactgcctagcctctccctaaagaagagagaagacaagtgggctgactgatctgctctaaatctactgtggtgattaaatcttggttacaacatcctgggaagtttcctgaacaactgtaaaataataaaattattttcagaatga

SEQ ID NO: 136 - DNA, 936 bp, HOMO SAPIENS
atccccatcccgtggagtggccggcgacaagatggcagcagcgtgtcggagcgtgaagggcctggtggcggtaataaccggaggagcctcgggcctgggcctggccacggcggagcgacttgtggggcagggagcctctgctgtgcttctggacctgcccaactcgggtggggaggcccaagccaagaagttaggaaacaactgcgttttcgccccagccgacgtgacctctgagaaggatgtgcaaacagctctggctctagcaaaaggaaagtttggccgtgtggatgtagctgtcaactgtgcaggcatcgcggtggctagcaagacgtacaacttaaagaagggccagacccataccttggaagacttccagcgagttcttgatgtgaatctcatgggcaccttcaatgtgatccgcctggtggctggtgagatgggccagaatgaaccagaccagggaggccaacgtggggtcatcatcaacactgccagtgtggctgccttcgagggtcaggttggacaagctgcatactctgcttccaaggggggaatagtgggcatgacactgcccattgctcgggatctggctcccataggtctgtttggcaccccactgctgaccagcctcccagagaaagtgtgcaacttcttggccagccaagtgcccttccctagccgactgggtgaccctgctgagtatgctcacctcgtacaggccatcatcgagaacccattcctcaatggagaggtcatccggctggatggggccattcgtatgcagccttgaagggagaaggcagagaaaacacacgctcctctgcccttcctttccctggggtactactctccagcttgggaggaagcccagtagccattttgtaactgcctaccagtcgccctctgtgcctaataaagtctctttttctcacagag

SEQ ID NO: 137 - DNA, 971 bp, HOMO SAPIENS
acacttccgtttccggtccgtgcccttggggctccgtgtcctgctgtctttccgtccgctgcctagtctgcatctgagtaacatggcggcggcggcggtagccaggctgtggtggcgcgggatcttgggggcctcggcgctgaccagggggactgggcgaccctccgttctgttgctgccggtgaggcgggagagcgccggggccgacacgcgccccactgtcagaccacggaatgatgtggcccacaagcagctctcagcttttggagagtatgtggctgaaatcttgcccaagtatgtccaacaagttcaggtgtcctgcttcaatgagttagaggtctgtatccatcctgatggcgtcatcccagtgctgactttcctcagggatcacaccaatgcacagttcaaatctctggttgacttgacagcagtggacgtcccaactcggcaaaaccgttttgagattgtctacaacctgttgtctctgcgcttcaactcacggatccgtgtgaagacctacacagatgagctgacgcccattgagtctgctgtctctgtgttcaaggcagccaactggtatgaaagggagatctgggacatgtttggagtcttctttgctaaccaccctgatctaagaaggatcctgacagattatggcttcgagggacatcctttccggaaagactttcctctatctggctatgttgagttacgttatgatgatgaagtgaagcgggtggtggcagagccggtggagttggcccaagagttccgcaaatttgacctgaacagcccctgggaggctttcccagtctatcgccaacccccggagagtctcaagcttgaagccggagacaagaagcctgatgccaagtagctccagggaacgcatgtggatcctagacagcgccttatctatgattgagtgtccgtgtaaataaattcctacttagacttacaaaaaaaaaaaa

SEQ ID NO: 138 - DNA, 3144 bp, HOMO SAPIENS
aggatgtgtagggggcggggcccggcggaagcgtatataaggccgggctcggggacgcccccccctcactcgcgcgttaggaggctcgggtcgttgtggtgcgctgtcttcccgcttgcgtcagggacctgcccgactcagtggccgccatggcatcagatgaaggcaaactttttgttggagggctgagttttgacaccaatgagcagtcgctggagcaggtcttctcaaagtacggacagatctctgaagtctgtagatggacggcagatccgagtagaccaggcaggcaagtcgtcagacaaccgatcccgtgggtaccgtggtggctctgccgggggccggggcttcttccgtgggggccgaggacggggccgtgggttctctagaggaggaggggaccgaggctatggggggaaccggttcgagtccaggagtgggggctacggaggctccagagactactatagcagccggagtcagagtggtggctacagtgaccggagctcgggcgggtcctacagagacagttatgacagttacggtaagtcacactccgagggcgccacgctgctgtggcctgcggtgggagctcggttcaccttggtgccctctccaagcactttaggctggacactcagaccttgtcactgtgcttgcccagaagaggcgcatctgtcctctcagagccatttctatcgcaggacgcaaaagccaaatgagactgaccaaaaaggcaagggagagcgagggcccgctgggcagtcagctaggtgcatgtgtggccgcaggccagcctccctcggctgtggggggtggttgctccccggccgcaggccgcgccctggtctggcctctggggtgaagctgcctcttgttgcttcggtgcctttacactgtgcctgcttcttgtcctcagctacacacaacgagtaaaaacccttcctgctcaagatcgtccttccaatggctgtgtgtttaaagattgtgggagcttcgctgaacgttaatgtgtagtaaatgcacctccttgtattcccactttcgtagtcatttcggttctgatcttgtcaaacccagcctgaccgcttctgacgccgggatggcctcgttactagacttttctttttaaggaagtgctgtttttttttgagggttttcaaaacattttgaaaagcatttacttttttgaccacgagccatgagttttcaaaaaaatcgggggttgtgtgggtttttggtttttgttttagtttttggttgcgttgcctttttttttttagtggggttggccccatgaagtgggtgccccactcacttctctgagatcgaacggactgtgaatccgctctttgtcggaagctgagcaagctgtggcttttttccaactccgtgtgacgtttctgagtgtagtgtggtaggaccccggcgggtgtggcagcaactgccctggagccccagcccctgcgtccatctgtgctgtgcgccccacagtagacgtgcagacgtccctgagaggttcttgaagatgtttatttatattgtccttttttactggaagacgtacgcatactccatcgatgttgtatttgcagtggctgaggaattcttgtacgcagttttctttggctttacgaagccgattaaaagaccgtgtgaaatgaaccttgctctgacaattcccttgcattgcaccacacactccttgctgcgggctcctgcagccagacctgagcagagagagaaggtggagaagcagcgggtctgcaagccttccctggggcctgcagagctagaaagggaggcccagcagactggcgctggtcagggtaggggagccaggcgggggacgggagcgggcagctcaggcctcagggcagccctgggaggcttctggcagtggtggccagagggctggactgtgcgggcagcttagcagggacagtggacgtgcacctgacgctgacctggactgcctcagtctagaagcaggccagagagcagaggcacgtggcatcccagggcgacctcagacggccagccggttagctagttctgctgttgcttcacgagttctgagcattctctgctagcctatggaagctgcagccctcggaggacagaagtgttgtgcgcccaacagaaccctctgagacgcaagctgctcccttggctagctcatatgtggaaatagccctgtaattcgaggtaactccttccgctcgtgtccacatccctcttgttgagagctcactgaaagtcatgtgcccggggaatgttcctgtgactgttttttgtttttccttttttttttaactttgtttttgtttttttcaattaagctggaactaaagtcaggcccagccattacgctccccacgtgcagccaggtgcagcctgggcccagtcatgcctggctcatagatgaaatcccttaagcaggattgaagaccagtgaacgcccccgccttttggattttttgctcaattgaccgtcttttccagacctctttaagtcacactcttaacttagctttctctgatgtctgttgccgccattagtttttttctagagcccacactggcccacatagctccatcccatacgggtagctggctccagctgcgccaaggtgcagacccgccctgggcatgctggcctgtgacggagcctgaggtcacagccccctgactagcctgagaccttcctaggggctgtggctgtttccggggaggccgggaggggcagctgtgagccctgtggaggacgttgggagtaacgctgctttgctttggcaggttgaaggggcccggccaggactcggggaagggtggcctgagagcagcgatgacctctggggtcactgtcccaggagggacttcacctggaacaagagctggaggcagccgcttgcccaggaggcttgtcccctgaggcgcttcgccagtgaggtgcgggctcagggcctcgagtctctcctggagcacgggctgcggtgcgccggcagcttacggggcggccagtccttgcccacaacgatgtggagccctgtgaaagtcggattcgaataaagggccacgtgtgcacccagaaaaaaaaaaaaaaaaaaaaaaaaaaaaaaaaaaaaaaaaaaaaaaaaaagg

SEQ ID NO: 139 - DNA, 3181 bp, HOMO SAPIENS
aagttctcgcgggacaccgacggggagcggaagccaggaggtattgctgcttcggcgaccgggcggcggcagcggcggcggcggctgtggcagagtctgtgcctgtggcggtgacggcggcgggagcaagcgctgccctcgcagagcagccttggggtcgccggccgctcgcagcgttgtggaggggcgggccggacgctgagcggagcagctgcgccacgggtggcattgtgtgtcccagagtgccggagcgagtcccagaagagaggcgaggctaagcccagagcgctgggttgcttcagcagggaagactcccttccccctgcttcaggctgctgagcactgagcagcgctcagaatggaagccatcgccaaatatgacttcaaagctactgcagacgacgagctgagcttcaaaaggggggacatcctcaaggttttgaacgaagaatgtgatcagaactggtacaaggcagagcttaatggaaaagacggcttcattcccaagaactacatagaaatgaaaccacatccgtttggaaacgatgtgcagcacttcaaggtgctccgagatggagccgggaagtacttcctctgggtggtgaagttcaattctttgaatgagctggtggattatcacagatctacatctgtctccagaaaccagcagatattcctgcgggacatagaacaggtgccacagcagccgacatacgtccaggccctctttgactttgatccccaggaggatggagagctgggcttccgccggggagattttatccatgtcatggataactcagaccccaactggtggaaaggagcttgccacgggcagaccggcatgtttccccgcaattatgtcacccccgtgaaccggaacgtctaagagtcaagaagcaattatttaaagaaagtgaaaaatgtaaaacacatacaaaagaattaaacccacaagctgcctctgacagcagcctgtgagggagtgcagaacacctggccgggtcaccctgtgaccctctcactttggttggaactttagggggtgggagggggcgttggatttaaaaatgccaaaacttacctataaattaagaagagtttttattacaaattttcactgctgctcctctttcccctcctttgtcttttttttcatccttttttctcttctgtccatcagtgcatgacgtttaaggccacgtatagtcctagctgacgccaataataaaaaacaagaaaccaagtgggctggtattctctctatgcaaaatgtctgttttagttggaatgactgaaagaagaacagctgttcctgtgttcttcgtatatacacacaaaaaggagcgggcagggccgctcgatgcctttgctgtttagcttcctccagaggaggggacttgtaggaatctgccttccagcccagacccccagtgtattttgtccaagttcacagtagagtagggtagaaggaaagcatgtctctgcttccatggcttcctgagaaagcccacctgggctgggcgcggtggctcacgcctgtaatcccagcactttgggaggccaaggtgggcggatcacaaggtcaggagttcgagaccaacctagccaacatggtgaaaccccgtctctactaaaaataagaaattagccgggtgtggcacgcacctgtagtcccagctacttgggagcctgaggcaggagaatcgcttgaacctgggaagtggaggttgagtgagccgggaccgtgccattgtactccagcctgggtgacagagcgagattccgtctcaaaaaaaaaaaaaaaaagcccacctgaaagcctgtctctttccactttgttggcccttccagtgggattatcgagcatgttgttttttcatagtgcctttttccttatttcaagggttgcttctgagtggtgttttttttttttttttaatttgttttgttttaaaataagttaaaggcagtccagagcttttcagccaatttgtctcctactctgtgtaaatatttttccctccgggcaggggagccagggtagagcaaaggagacaaagcaggagtggaaggtgaggcgttctcctgcttgtactaagccaggaggctttaagctccagctttaagggttgtgagccccttgggggttcagggaactgcttgcccagggtgcagtgtgagtgtgatgggccaccggggcaagagggaaggtgaccgcccagctctcccacatcccactggatctggcttacaggggggtcggaagcctgtcctcaccgtctcgggggttgtggcccccgccccctccctatatgcacccctggaaccagcaagtcccagacaaggagagcggaggaggaagtcatgggaacgcagcctccagttgtagcaggtttcactattcctatgctggggtacacagtgagagtactcacttttcacttgtcttgctcttagattgggccatggctttcatcctgtgtcccctgacctgtccaggtgagtgtgagggcagcactgggaagctggagtgctgcttgtgcctcccttcccagtgggctgtgttgactgctgctccccacccctaccgatggtcccaggaagcagggagagttggggaaggcaagattggaaagacaggaagaccaaggcctcggcagaactctctgtcttctctccacttctggtcccctgtggtgatgtgcctgtaatctttttctccacccaaaccccttcccacgacaaaaacaagactgcctccctctcttccgggagctggtgacagccttgggcctttcagtcccaaagcggccgatgggagtctccctccgactccagatatgaacagggcccaggcctggagcgtttgctgtgccaggaggcggcagctcttctgggcagagcctgtccccgccttccctcactcttcctcatcctgcttctcttttcctcgcagatgataaaaggaatctggcattctacacctggaccatttgattgttttattttggaattggtgtatatcatgaagccttgctgaactaagttttgtgtgtatatatttaaaaaaaaaatcagtgtttaaataaagacctatgtacttaatcctttaactctgcggatagcatttggtaggtagtgattaactgtgaataataaatacacaatgaattcttca

SEQ ID NO: 140 - DNA, 4959 bp, HOMO SAPIENS
cccccacacaccccagccgaggcccggaaggggccaggcgcgcttccgtctccgccggggatgcacggagggcggagctgcggcccgaggacgcgacgcgagcccagttccggcgaggaggccgcgccagtgacagcgatggcggcggagtcggcgctccaagttgtggagaagctgcaggcgcgcctggccgcgaacccggaccctaagaagctattgaaatatttgaagaaactctccaccctgcctattacagtagacattcttgcggagactggggttgggaaaacagtaaatagcttgcgaaaacacgagcatgttggaagctttgccagggacctagtggcccagtggaagaagctggttcctgtggaacgaaatgctgagcctgatgaacaggactttgagaagagcaattcccgaaagcgccctcgggatgccctgcagaaggaggaggagatggagggggactaccaagaaacctggaaagccacggggagccgatcctatagccctgaccacaggcagaagaaacataggaaactctcggagctcgagagacctcacaaagtgtctcacggtcatgagaggagagatgagagaaagaggtgtcacagaatgtcaccaacttactcttcagaccctgagtcttctgattatggccatgttcaatcccctccatcttgtaccagtcctcatcagatgtacgtcgaccactacagatccctggaggaggaccaggagcccattgtttcacaccagaagcctgggaaaggccacagcaatgcctttcaggacagactcggggccagccaagaacgacacctgggtgaaccccatgggaaaggggttgtgagtcaaaacaaggagcacaaatcttcccacaaggacaaacgccccgtggatgccaagagtgatgagaaggcctctgtggtgagcagagagaaatcacacaaggccctctccaaagaggagaaccgaaggccaccctcaggggacaatgcaagggagaaaccgccctctagtggcgtaaagaaagagaaggacagagagggcagcagcctgaagaagaagtgtttgcctccctcagaggccgcttcagacaaccacctgaaaaagccaaagcacagagacccagagaaagccaaattggacaaaagcaagcaaggtctggacagctttgacacaggaaaaggagcaggagacctgttgcccaaggtaaaagagaagggttctaacaacctaaagactccagaagggaaagtcaaaactaatttggatagaaagtcactgggctccctccctaaagttgaggagacagatatggaggatgaattcgagcagccaaccatgtcttttgaatcctacctcagctatgaccagccccggaagaaaaagaaaaagattgtgaaaacttcagccacggcacttggagataaaggacttaaaaaaaatgactctaaaagcactggtaaaaacttggactcagttcagaaattacccaaggtgaacaaaaccaagtcagagaagccggctggagctgatttagccaagctgagaaaggtgcctgatgtgttgccagtgttgccagacctcccgttacccgcgatacaggccaattaccgtccactgccttccctcgagctgatatcctccttccagccaaagcgaaaagcgttctcttcaccccaggaagaagaagaagctggatttactgggcgcagaatgaattccaagatgcaggtgtattctggttccaagtgtgcctatctccctaaaatgatgaccttgcaccagcaatgcatccgagtacttaaaaacaacatcgattcaatctttgaagtgggaggagtcccatactctgttcttgaacccgttttggagaggtgtacacctgatcagctgtatcgcatagaggaatacaatcatgtattaattgaagaaacagatcaattatggaaagttcattgtcaccgagactttaaggaagaaagacccgaagagtatgagtcgtggcgagagatgtacctgcggcttcaggacgcccgagagcagcggctacgagtactaacaaagaatatccagttcgcacatgccaataagcccaaaggccgacaagcaaagatggcctttgtcaactctgtggccaagccacctcgtgacgtccggaggaggcaggaaaagtttggaacgggaggagcagctgtccctgagaaaatcaagatcaagccagccccgtaccccatgggaagcagccatgcttccgccagtagcatcagctttaaccccagccctgaggagccggcctatgatggcccaagcaccagcagtgcccacttggcaccagtggtcagcagcactgtttcctatgatcctaggaaacccactgtgaagaaaattgccccaatgatggccaagacaattaaagctttcaagaacagattctcccgacgataaactgaggacttgccttggaaatggaatctggggaggcaggaatacaaggacagtgggggttggggaatggaattctacaggagactggagtcttgctttgtggatccttttggtctccgagtcctgcagtctgcaggtgctgcccctgggaacctgcgtgccacagccccgcctccctgcctggagcacactttagaattctgaagatgtgaagcctctgtctcactgaggattttaaaggtcaattatacttttgttgttcattagcatctttgtaaactataagacgtagttttaattaataaatattgcccccagattgtatttatattatcccccaggtttgtttttgttttttgtcctctaccacacatttagccttttatcttccaggtccttattaaaatcagatgaaagcctagtgaaagccagtctcctgccccagctcagctctgtgtggactctggtccagacagaggactgggcatctccagagcctgcacagtacctgctgcacgtagggcaaggaatgagcactagaccgcctgtccccaagggagcctcagtggggcgacagggtgctcggcggactccacctcaggccctccccactgttgctgtgcattcctgtgcaggtgcatctctttcttactaactggtatttattaagggaggtgctctgtaggtctggagcctttccctcatcctttttgcgagtccccacctttttgtttttttttttttctttgaggctcactagaggacgcagaaccttgggagattgatttgcacagaactccccacctcccacttttacaatttccagtttctgattgaaaattttagggtttctccccactgcccttccctatctttccttcccctcaacaccatgaaggaaaaacacacacggcagggctttttgtagccctgaaggcaactttagacatttaaaatccagcactttaatctcttgttctctgtgaatcactatgagaagtgaatggttttaaaggctgtaatgctatgttggaaattggtttgttttgccttttattgaaaaggtaagatcatgtgattggaagaacacaactgttggcttgggaagaggactttgctgctgaagtgttttctaccttctgagtgtgtttaaggcaggatttggagggaaggaccagcttagggagagtgtctgagccacagcgtcaggatgggggaaaccacatgggatccatcaagttccagttgaacaggagcaagatcagaacttaggagggcagtgtcagctcccttgttggctgtcaaggaacaccgatctagtagaaacccacttggttgtgacccaggtagaggtagatgccatacatttgagatatgcgtccttaaggaacctgacaagcagactgaagggatggtaagtgtgacagcctgataagttttctcaaagcccaggatacagagccagtgttttctgtaactggagacctcagttaggccaacttcgaattccagagcaacgtaggaagtctattcagcagaaactcgacattgttcagtgtgtattgctgtgcagggtgcctattgtgacaggacacaaatgttactatgttttaatttgctatatttttgaatgggtaaagcattactttacttctcttggttacttgtaccaccattccacccctatccctagcctgccccacaaatctaatattaggaagcctcttaactgaaaccaaatgaacatttgggtcaggtgccagatgtctgctgcctagaatagctttttctaggtgtctaccaccttgaatttatctcttaactgtgtgttcaagtctttgtcattgaaactagtttttcatatcttagattcagttgtgtatgatttaatgtcccttattaggagtctttaggcagggagggaagaaaaaacagatttgttcatagcaatgtcagtatccattttggcacataaagatttttgatgagccctgtttgcatagagccagatgttttcccctcccccaagagtatctacatcagggatgtgacttggtgcgaagagtcaggggaaagaggaaaaacccaatttctaaatgacctccttgcccagcttactaaaatggctgcagagcagacacaggatgaatttgaacctgacacaggatgaatttgaacctttggtctcatttatggaaaaacttgtgcaattttttttctgtgctacactacatacaaatcaccaaattacaaattacccttttgtgatccttggtgtactgagcagtttctttggggctttttctttctgggaagcgggagggaaaggagcaaggtgtcatcctgctcttcatttgtattttggtcccaaaatgtaaatacaattttctatgttacttttttgtggtaactaccgagatgaatattttaattagataagttatatgaaaaggaaaattccatgtctaaataaaaaacaaactccaaaaaaaaaaaaaaaaa

SEQ ID NO: 141 - DNA, 743 bp, HOMO SAPIENS
cgcgcctagcagtgtcccagccgggttcgtgtcgccatggggcagatcgagtgggccatgtgggccaacgaacaggcgctggcgtccggcctgatcctcatcaccgggggcatcgtggccacagctgggcgcttcacccagtggtactttggtgcctactccattgtggcgggcgtgtttgtgtgcctgctggagtacccccgggggaagaggaagaagggctccaccatggagcgctggggacagaagtacatgaccgccgtggtgaagctgttcgggccctttaccaggaattactatgttcgggccgtcctgcatctcctgctctcggtgcccgccggcttcctgctggccaccatccttgggaccgcctgcctggccattgcgagcggcatctacctactggcggctgtgcgtggcgagcagtggacgcccatcgagcccaagccccgggagcggccgcagatcggaggcaccatcaagcagccgcccagcaaccccccgccgcggcccccggccgaggcccgcaagaagcccagcgaggaggaggctgcggtggcggcggggggacccccgggaggtccccaggtcaaccccatcccggtgaccgacgaggtcgtgtgacctcgccccggacctgccctcccgccaggtgcacccacctgcaataaatgcagcgaagccgggaaaaaaaaaaaaaaaaaaaaaaaaaaaaaaaaaaaaaaaaaaaaaaaaaaaaaaaa

SEQ ID NO: 142 - DNA, 1827 bp, HOMO SAPIENS
atttggctctggaggaggtgggtcaaggactccatgccccgccccctgccccgcccttaccccgccccatgcattggcacccggaggggctcagctgacgccgcacttcacgtgacgccggtgccgggcgaacatggcggcggccaccggaccctcgttttggctggggaatgaaaccctgaaggtgccgctggcgctctttgccttgaaccggcagcgcctgtgtgagcggctgcggaagaaccctgctgtgcaggccggctccatcgtggtcctgcagggcggggaggagactcagcgctactgcaccgacaccggggtcctcttccgccagattgccagcgtcctgacgtcacagaagccctctgtcctcctcactttgcgtggcgtcaacacggacagcggcagtgtctgcagggaggcctcctttgacggcatcagcaagttcgaagtcaacaataccattcttcacccagagatcgttgagtgccgagtgtttaagacggatatggagctggaggttctgcgctataccaataaaatctccagcgaggcccaccgtgaggtaatgaaggctgtaaaagtgggaatgaaagaatatgagttggaaagcctcttcgagcactactgctactcccggggcggcatgcgccacagctcctacacctgcatctgcggcagtggtgagaactcagccgtgctacactacggacacgccggagctcccaacgaccgaacgatccagaatggggatatgtgcctgttcgacatgggcggtgagtattactgcttcgcttccgacatcacctgctcctttcccgccaacggcaagttcactgcagaccagaaggccgtctatgaggcagtgctgcggagctcccgtgccgtcatgggtgccatgaagccaggtgtctggtggcctgacatgcaccgcctggctgaccgcatccacctggaggagctggcccacatgggcatcctgagcggcagcgtggacgccatggtccaggctcacctgggggccgtgtttatgcctcacgggcttggccacttcctgggcattgacgtgcacgacgtgggaggctacccagagggcgtggagcgcatcgacgagcccggcctgcggagcctgcgcactgcacggcacctgcagccaggcatggtgctcaccgtggagccgggcatctacttcatcgaccacctcctggatgaggccctggcggacccggcccgcgcctccttccttaaccgcgaggtcctgcagcgctttcgcggttttggcggggtccgcatcgaggaggacgtcgtggtgactgacagcggcatagagctgctgacctgcgtgccccgcactgtggaagagattgaagcatgcatggcaggctgtgacaaggcctttacccccttctctggccccaagtagagccagccagaaatcccagcgcacctgggggcctggccttgcaacctcttttcgtgatgggcagcctgctggtcagcactccagtagcgagagacggcacccagaatcagatcccagcttcggcatttgatcagaccaaacagtgctgtttcccggggaggaaacacttttttaattacccttttgcaggctcccacctttaatctgttttataccttgcttattaaatgagcgacttaaaatgattgaaaataatgctgttctttagtagcaactaaaatgtgtcttgctgtcatttatattccttttcccaggaaagaagcatttctgatactttctgtcaaaaatcaatatgcagaatggcatttgcaataaaaggtttcctaaaatggtccaaaaaaaaa

SEQ ID NO: 143 - DNA, 4045 bp, HOMO SAPIENS
gcagccagagctcagcagggccctggagagatggccacggtcccagcaccggggaggactggagagcgcgcgctgccaccgccccatgtctcagccagggcttccttcctcggctccaccctgtggatgtaatggcggcccctgctctgtcctggcgtctgcccctcctcatcctcctcctgcccctggctacctcttgggcatctgcagcggtgaatggcacttcccagttcacatgcttctacaactcgagagccaacatctcctgtgtctggagccaagatggggctctgcaggacacttcctgccaagtccatgcctggccggacagacggcggtggaaccaaacctgtgagctgctccccgtgagtcaagcatcctgggcctgcaacctgatcctcggagccccagattctcagaaactgaccacagttgacatcgtcaccctgagggtgctgtgccgtgagggggtgcgatggagggtgatggccatccaggacttcaagccctttgagaaccttcgcctgatggcccccatctccctccaagttgtccacgtggagacccacagatgcaacataagctgggaaatctcccaagcctcccactactttgaaagacacctggagttcgaggcccggacgctgtccccaggccacacctgggaggaggcccccctgctgactctcaagcagaagcaggaatggatctgcctggagacgctcaccccagacacccagtatgagtttcaggtgcgggtcaagcctctgcaaggcgagttcacgacctggagcccctggagccagcccctggccttcaggacaaagcctgcagcccttgggaaggacaccattccgtggctcggccacctcctcgtgggcctcagcggggcttttggcttcatcatcttagtgtacttgctgatcaactgcaggaacaccgggccatggctgaagaaggtcctgaagtgtaacaccccagacccctcgaagttcttttcccagctgagctcagagcatggaggagacgtccagaagtggctctcttcgcccttcccctcatcgtccttcagccctggcggcctggcacctgagatctcgccactagaagtgctggagagggacaaggtgacgcagctgctcctgcagcaggacaaggtgcctgagcccgcatccttaagcagcaaccactcgctgaccagctgcttcaccaaccagggttacttcttcttccacctcccggatgccttggagatagaggcctgccaggtgtactttacttacgacccctactcagaggaagaccctgatgagggtgtggccggggcacccacagggtcttccccccaacccctgcagcctctgtcaggggaggacgacgcctactgcaccttcccctccagggatgacctgctgctcttctcccccagtctcctcggtggccccagccccccaagcactgcccctgggggcagtggggccggtgaagagaggatgcccccttctttgcaagaaagagtccccagagactgggacccccagcccctggggcctcccaccccaggagtcccagacctggtggattttcagccaccccctgagctggtgctgcgagaggctggggaggaggtccctgacgctggccccagggagggagtcagtttcccctggtccaggcctcctgggcagggggagttcagggcccttaatgctcgcctgcccctgaacactgatgcctacttgtccctccaagaactccagggtcaggacccaactcacttggtgtagacagatggccagggtgggaggcaggcagctgcctgctctgcgccgagcctcagaaggaccctgttgagggtcctcagtccactgctgaggacactcagtgtccagttgcagctggacttctccacccggatggcccccacccagtcctgcacacttggtccatccatttccaaacctccactgctgctcccgggtcctgctgcccgagccaggaactgtgtgtgttgcaggggggcagtaactccccaactccctcgttaatcacaggatcccacgaatttaggctcagaagcatcgctcctctccagccctgcagctattcaccaatatcagtcctcgcggctctccagggctccctgccctgacctcttccctgggttttctgccccagcctcctccttccctcccctccccgtccacagggcagcctgagcgtgctttccaaaacccaaatatggccacgctccccctcggttcaaaaccttgcacaggtcccactgccctcagccccacttctcagcctggtacttgtacctccggtgtcgtgtggggacatccccttctgcaatcctccctaccgtcctcctgagccactcagagctccctcacaccccctctgttgcacatgctattccctggggctgctgtgcgctccccctcatctaggtgacaaacttccctgactcttcaagtgccggttttgcttctcctggagggaagcactgcctcccttaatctgccagaaacttctagcgtcagtgctggagggagaagctgtcagggacccagggcgcctggagaaagaggccctgttactattcctttgggatctctgaggcctcagagtgcttggctgctgtatctttaatgctggggcccaagtaagggcacagatccccccacaaagtggatgcctgctgcatcttcccacagtggcttcacagacccacaagagaagctgatggggagtaaaccctggagtccgaggcccaggcagcagccccgcctagtggtgggccctgatgctgccaggcctgggacctcccactgccccctccactggaggggtctcctctgcagctcagggactggcacactggcctccagaagggcagctccacagggcagggcctcattatttttcactgccccagacacagtgcccaacaccccgtcgtataccctggatgaacgaattaattacctggcaccacctcgtctgggctccctgcgcctgacattcacacagagaggcagagtcccgtgcccattaggtctggcatgccccctcctgcaaggggctcaaccccctaccccgacccctccacgtatctttcctaggcagatcacgttgcaatggctcaaacaacattccaccccagcaggacagtgaccccagtcccagctaactctgacctgggagccctcaggcacctgcacttacaggccttgctcacagctgattgggcacctgaccacacgcccccacaggctctgaccagcagcctatgagggggtttggcaccaagctctgtccaatcaggtaggctgggcctgaactagccaatcagatcaactctgtcttgggcgtttgaactcagggagggaggcccttgggagcaggtgcttgtggacaaggctccacaagcgttgagccttggaaaggtagacaagcgttgagccactaagcagaggaccttgggttcccaatacaaaaatacctactgctgagagggctgctgaccatttggtcaggattcctgttgcctttatatccaaaataaactcccctttcttgaggttgtctgagtcttgggtctatgccttgaaaaaagctgaattattggacagtctcacctcctgccatagggtcctgaatgtttcagaccacaaggggctccacacctttgctgtgtgttctggggcaacctactaatcctctctgcaagtcggtctccttatccccccaaatggaaattgtatttgccttctccactttgggaggctcccacttcttgggagggttacattttttaagtcttaatcatttgtgacatatgtatctatacatccgtatcttttaatgatccgtgtgtaccatctttgtgattatttccttaatattttttctttaagtcagttcattttcgttgaaatacatttatttaaagaaaaatctttgttactctgtaaatgaaaaaacccattttcgctataaataaaaggtaactgtacaaaataagtacaatgcaacaaaa

SEQ ID NO: 144 - DNA, 683 bp, HOMO SAPIENS
ctgcgcagatgaggggagactcgtcaccaggcgtgcagtgggcactgctgggctcccccatcccgtcctaacccggaacagccccgggcaggaggcgtggaaagtcgagggggtaaaccgcgaatgtgcgttgtgtaagccacggcgcagggtggggcgcgggcgggacttgggcgggcggggtgggcttggccgagctggcctccggggcaccgaccgctataaggccagtcggactgcgacacagcccatcccctcgaccgctcgcgtcgcatttggccgcctccctaccgctccaagcccagccctcagccatggcatgccccctggatcaggccattggcctcctcgtggccatcttccacaagtactccggcagggagggtgacaagcacaccctgagcaagaaggagctgaaggagctgatccagaaggagctcaccattggctcgaagctgcaggatgctgaaattgcaaggctgatggaagacttggaccggaacaaggaccaggaggtgaacttccaggagtatgtcaccttcctgggggccttggctttgatctacaatgaagccctcaagggctgaaaataaatagggaagatggagacaccctctgggggtcctctctgagtcaaatccagtggtgggtaattgtacaataaattttttttggtcaaattt

SEQ ID NO: 145 - DNA, 1669 bp, HOMO SAPIENS
ctccctcagcaaggacagcagaggaccagctaagagggagagaagcaactacagaccccccctgaaaacaaccctcagacgccacatcccctgacaagctgccaggcaggttctcttcctctcacatactgacccacggctccaccctctctcccctggaaaggacaccatgagcactgaaagcatgatccgggacgtggagctggccgaggaggcgctccccaagaagacaggggggccccagggctccaggcggtgcttgttcctcagcctcttctccttcctgatcgtggcaggcgccaccacgctcttctgcctgctgcactttggagtgatcggcccccagagggaagagttccccagggacctctctctaatcagccctctggcccaggcagtcagatcatcttctcgaaccccgagtgacaagcctgtagcccatgttgtagcaaaccctcaagctgaggggcagctccagtggctgaaccgccgggccaatgccctcctggccaatggcgtggagctgagagataaccagctggtggtgccatcagagggcctgtacctcatctactcccaggtcctcttcaagggccaaggctgcccctccacccatgtgctcctcacccacaccatcagccgcatcgccgtctcctaccagaccaaggtcaacctcctctctgccatcaagagcccctgccagagggagaccccagagggggctgaggccaagccctggtatgagcccatctatctgggaggggtcttccagctggagaagggtgaccgactcagcgctgagatcaatcggcccgactatctcgactttgccgagtctgggcaggtctactttgggatcattgccctgtgaggaggacgaacatccaaccttcccaaacgcctcccctgccccaatccctttattaccccctccttcagacaccctcaacctcttctggctcaaaaagagaattgggggcttagggtcggaacccaagcttagaactttaagcaacaagaccaccacttcgaaacctgggattcaggaatgtgtggcctgcacagtgaagtgctggcaaccactaagaattcaaactggggcctccagaactcactggggcctacagctttgatccctgacatctggaatctggagaccagggagcctttggttctggccagaatgctgcaggacttgagaagacctcacctagaaattgacacaagtggaccttaggccttcctctctccagatgtttccagacttccttgagacacggagcccagccctccccatggagccagctccctctatttatgtttgcacttgtgattatttattatttatttattatttatttatttacagatgaatgtatttatttgggagaccggggtatcctgggggacccaatgtaggagctgccttggctcagacatgttttccgtgaaaacggagctgaacaataggctgttcccatgtagccccctggcctctgtgccttcttttgattatgttttttaaaatatttatctgattaagttgtctaaacaatgctgatttggtgaccaactgtcactcattgctgagcctctgctccccaggggagttgtgtctgtaatcgccctactattcagtggcgagaaataaagtttgcttagaaaagaa

SEQ ID NO: 146 - DNA, 4796 bp, HOMO SAPIENS
tccggaggcgagccgagcgcggtggtgaggccgcctcagcgaaaaaaatgtccgcctgaagagacccacaagttctattcggggggaccgacagcccgccccgggaggaaggggcggccaggcccgaaagccgcctccccctcccagacccgagagctcgtgcggggcaaagtgaaccgagccgctgggcggtgcaaggggaagcccaagcccgttctcccggccaaagtgaactttaatcggggtggttggatgcggagacggggcggcagaagtggccgaagatgaatccccagcaacaacgcatggccgctatagggaccgacaaggagctgagcgacctactggacttcagtgcgatgttttccccacctgttaatagtgggaaaactagaccaactacactgggaagcagtcaattcagtggatcaggtattgatgaaagaggaggtacaacatcttggggaacaagtggtcaaccaagtccttcctatgattcatctagaggttttacagacagccctcattacagtgatcacttgaatgacagtcgattaggagcccatgaaggcttgtccccaacacctttcatgaactcaaatctgatgggaaaaacatcagagagaggctcattttccctgtacagcagagatactggattaccaggctgtcaatctagtctcctgagacaagatctggggcttgggagcccagcacagctatcttcttcaggaaaacctgggacagcatactattcattctctgctacaagttccaggaggagaccactccatgactctgcagcgcttgatcccttgcaagcaaaaaaagtcagaaaggtgcctcctggtttgccttcttctgtatatgcaccatccccaaattcagatgatttcaaccgtgaatctcctagttatccatctcctaagccaccaaccagtatgttcgctagcactttctttatgcaagatgggacccacaattcttctgacctttggagttcatcaaatgggatgagccagcctggttttggtggaattctggggacctccacttcccacatgtctcaatccagtagttatggcaaccttcattcacatgaccgcttgagttatcctccacactcagtttcaccaacagacataaacacgagtcttccaccaatgtccagctttcatcgcggcagtaccagcagttcaccttacgttgctgcctcacacactcctcccatcaatggatcagacagcattctaggaaccagagggaatgctgctggaagctcacagacaggtgatgcacttggaaaggctttggcatctatttattctcctgaccataccagcagtagttttccgtcaaatccatcaacaccagttggatcaccttcacctctcacaggtaccagtcagtggccaagacctggagggcaagcaccttcatccccaagctatgaaaactcactccactccctgaaaaatcgagttgagcagcaacttcacgagcatttgcaagatgcaatgtccttcttaaaggatgtctgtgagcagtctcgaatggaggatcgtttagacagactggatgatgcaatccatgtgctgcggaaccatgctgtgggaccttccaccagtttgcctgctggtcacagtgatatacatagtttattgggaccatcccataatgcaccaattggaagcctcaattcaaactatggaggatcaagccttgttgcaagcagtcgatcagcttcaatggttggaactcatcgggaagactctgtcagtctcaatggcaatcattcagtcctgtctagtacagtcactacttcaagcacagacctgaaccataaaacacaagaaaattatagaggtggcttgcaaagtcagtctggaactgttgttacaacagaaatcaagactgaaaacaaagaaaaggatgaaaaccttcatgaacctccttcatcagatgacatgaagtcagatgatgaatcctcccaaaaagatatcaaggtttcatctagaggcagaacaagcagtactaatgaagatgaggatttgaaccctgaacagaagatagaaagggagaaggagaggcggatggctaacaatgccagagaacgcttacgcgtgcgggatattaatgaagcattcaaagagcttggccgaatgtgtcagcttcacttgaagagtgaaaaaccccaaacaaaactccttattcttcatcaagccgtggcagtcatccttagtctagaacagcaagtcagagagaggaaccttaaccccaaagcagcctgccttaagagaagggaagaagaaaaagtttctgccgtatcggcagagccgccaaccacactgccaggaacccatcctgggcttagtgaaactaccaaccctatgggtcatatgtaaacatcagccagttccagagttatcagtaggctagatagaaggtgacctctcctcataaggacttggacaactcagattatctgaagacacaaacctgacaggagggagaagaaaaaacaaaacacttgaaccaagaaactcaaatgtaatcctacgatcaaagcaactggtcaacacttccatcagaagtgaagataggaagctcatcagatagaacatcagcccatgagatgtttgcaacaaatcttttgttgcaagcagtgtgtcgcttctgcacaatcagagactgtctcgatctctccactcaccgtggaagttgccttgtgcctaaactgaattgacaaatgcattgtaactacaaattttatttattgttatgaaactgtaaggtctacatataaagggaaaaagttaatgtggaaagctgatctacactcagctgatgccagcatacattaaagcggttcacgtgcagagaacaaagcagtgacaaccattggcccttagcattcccggcatacctattagtgtcttaaaaaggaagggaaaagtcttttgttgccctctcctatcctcttgccatatgaatagcgttttccatgaaataggaaaatattacttggtatagcatttctcttgctctcattttttgatttatttttattttctctttgtgggtgttatatttgatctctaaatctgaacagtttatggtcacagtccagcctcctccgtgcagccctgtgtgctttgcacatttaccttacagtggtaagcagagaccatctgtgaccatagcctagctagcattttaaaaggggaaattttgttctctaggttttcccccaaataaacattgctttatttctaataataaccaagacttttcaagcttctagatctcataggaaagcttgtaatagcaaaattgtaaattacaagggaagaatctactttttagaaatcgctttgttttccaagcagtaagtactacatacagtacttgtaaagtgttagctgtaagtaagcacaaaatacatttaaaatacaaagacgattttttcaggctgtgattatggtgaacataacaaaacccagtagtcaccaaggcaggtagtgtgataaatgaacacaccactctgaggctaattacctaatggaatacaagagcaatggtcacccgtatttccttatcctagcctttatttctctgtcatttggatggctggtcaatggggaagaattgagtgggtgatttaatcaactgcaaaccatctgcccctgtcccaaaatgatgagccagattagcattaaaccagtacttgtcagtccatcttaatactgttcattaaggcactctctgtctctaatccttaggagttgttttaaaagacataatcactttgaacttccatgaaacctgtcttccaccacaacaaccctgggagagaaaaacatgctaaaggaggtatcttggcttaataattccttatagccaatatcaacagtggcaatcagcacacagaggaaaggacccaaatcactatgtagcttaaagatttctgttaatttgaaagaacaaaaacaagacagaacttctggtactctaatcaggatgattcctaacaagtcagtcatttgtgaacttagtggactttttggttactttaatttgcatatattctccagttacatcggactctatctgtggccttgttcttcatttcagtgttaatcagctaaacagaagttgttgcttatgatgtgtgagtgaacatatgccactgcctggcctttttttcttcagagcttgttgtctttttcgctatattagactttgcagtatgcccagaagctttccttcataaaatagaaagaaaaaaacatttggcttatttttcactgtagctagtcttttatacaataatcttgtaagaaaatttcttgaattctaaatattactctttctagatttttgaaatcaaaaagttttcagtaaaaagtttcttactttattttattatattaggtagtaaaaaatgtagggttatttaccataacctgttcattaatatcagaaatttacaatagcattttaagaccatagtaggattctagcataccgtgtagtacctatggagtattgtaagagctaattgttggagatgaattgcttctcatcttgttctccagtttccattgttggtttattgcagatttgtatcctgtgtcaaattcaaggtattattgataaaccttttcaaccagcagcaagaagttcaaatttttttctgtcactgtaacagaaaacacaatatgtatataacatttatgtagcaataaatgtgccatcttttttttaacacagtaaaaaaaaaaaaaaaaaaaaaa

SEQ ID NO: 147 - DNA, 7453 bp, HOMO SAPIENS
atcaccatcgccgtgaagtcacagtggcaagatgaaaatgtttaaaaaaattttaaaaaggaataaggaaagaggaagaggacagcgtgccccggctcagaaaacggtcctcctctgccccggacgccggcggacctgtggggtatgaccgaatctccccgcgcagccggcaagccccggccctcagtcgggccgcgaccagcgtgacgccgcggtagggggatccggcgggcgcgcggccgtcttcaaagccccggcgccgccgccgcccccgcgcgcgcgcgcgagtagtacggtccgagggggcggcttctggggcgcggctccggcggcagctgatgcgcgccccgccggccgggaggcgggagtccgcgagccgggagcgggagcagcagaggtctagcagccgggcgccgcgggccgggggcctgaggaggccacaggacgggcgtcttcccggctagtggagcccggcgcggggcccgctgcggccgcaccgtgaggggaggaggccgaggaggacgcagcgccggctgccggcgggaggaagcgctccaccagggcccccgacggcactcgtttaaccacatccgcgcctctgctggaaacgcttgctggcgcctgtcaccggttccctccattttgaaagggaaaaaggctctccccacccattcccctgcccctaggagctggagccggaggagccgcgctcatggcgttcagcccgtggcagatcctgtcccccgtgcagtgggcgaaatggacgtggtctgcggtacgcggcggggccgccggcgaggacgaggctggcgggcccgagggcgaccccgaggaggaggattcgcaagccgagaccaaatccttgagtttcagctcggattctgaaggtaattttgagactcctgaagctgaaaccccgatccgatcacctttcaaggagtcctgtgatccatcactcggattggcaggacctggggccaaaagccaagaatcacaagaagctgatgaacagcttgtagcagaagtggttgaaaaatgttcatctaagacttgttctaaaccttcagaaaatgaagtgccacagcaggccattgactctcactcagtcaagaatttcagagaagaacctgaacatgattttagcaaaatttccatcgtgaggccattttcaatagaaacgaaggattccacggatatctcggcagtcctcggaacaaaagcagctcatggctgtgtaactgcagtctcaggcaaggctctgccttccagcccgccagacgccctccaggacgaggcgatgacagaaggcagcatgggggtcaccctcgaggcctccgcagaagctgatctaaaagctggcaactcctgtccagagcttgtgcccagcagaagaagcaagctgagaaagcccaagcctgtccccctgaggaagaaagcaattggaggagagttctcagacaccaacgctgctgtggagggcacacctctccccaaggcatcctatcacttcagtcctgaagagttggatgagaacacaagtcctttgctaggagatgccaggttccagaagtctccccctgaccttaaagaaactcccggcactctcagtagtgacaccaacgactcaggggttgagctgggggaggagtcgaggagctcacctctcaagcttgagtttgatttcacagaagatacaggaaacatagaggccaggaaagcccttccaaggaagcttggcaggaaactgggtagcacactgactcccaagatacaaaaagatggcatcagtaagtcagcaggtttagaacagcctacagacccagtggcacgagacgggcctctctcccaaacatcttccaagccagatcctagtcagtgggagagccccagcttcaacccctttgggagccactctgttctgcagaactccccacccctctcttctgagggctcctaccactttgacccagataactttgacgaatccatggatccctttaaaccaactacgaccttaacaagcagtgacttttgttctcccactggtaatcacgttaatgaaatcttagaatcacccaagaaggcaaagtcgcgtttaataacgagtggctgtaaggtgaagaagcatgaaactcagtctctcgccctggatgcatgttctcgggatgaaggggcagtgatctcccagatttcagacatttctaatagggatggccatgctactgatgaggagaaactggcatccacgtcatgtggtcagaaatcagctggtgccgaggtgaaaggtgagccagaggaagacctggagtactttgaatgttccaatgttcccgtgtctaccataaatcatgcgttttcatcctcagaagcaggcatagagaaggagacgtgccagaagatggaagaagacgggtccactgtgcttgggctgctggagtcctctgcagagaaggcccctgtgtcggtgtcctgtggaggtgagagccccctggatgggatctgcctcagcgaatcagacaagacagccgtgctcaccttaataagagaagagataattactaaagagattgaagcaaatgaatggaagaagaaatacgaagagacccggcaagaagttttggagatgaggaaaattgtagctgaatatgaaaagactattgctcaaatgattgaagatgaacaaaggacaagtatgacctctcagaagagcttccagcaactgaccatggagaaggaacaggccctggctgaccttaactctgtggaaaggtccctttctgatctcttcaggagatatgagaacctgaaaggtgttctggaagggttcaagaagaatgaagaagccttgaagaaatgtgctcaggattacttagccagagttaaacaagaggagcagcgataccaggccctgaaaatccacgcagaagagaaactggacaaagccaatgaagagattgctcaggttcgaacaaaagcaaaggctgagagtgcagctctccatgctggactccgcaaagagcagatgaaggtggagtccctggaaagggccctgcagcagaagaaccaagaaattgaagaactgacaaaaatctgtgatgagctgattgcaaagctgggaaagactgactgagacactccccctgttagctcaacagatctgcatttggctgcttctcttgtgaccacaattatcttgccttatccaggaataattgcccctttgcagagaaaaaaaaaaacttaaaaaaagcacatgcctactgctgcctgtcccgctttgctgccaatgcaacagccctggaagaaaccctagagggttgcatagtctagaaaggagtgtgacctgacagtgctggagcctcctagtttccccctatgaaggttcccttaggctgctgagtttgggtttgtgatttatctttagtttgttttaaagtcatctttactttcccaaatgtgttaaatttgtaactcctctttggggtcttctccaccacctgtctgatttttttgtgatctgtttaatcttttaattttttagtatcagtggttttatttaaggagacagtttggcctattgttacttccaatttataatcaagaaggggctctggatccccttttaaattacacacactctcacacacatacatgtatgtttatagatgctgctgctcttttccctgaagcatagtcaagtaagaactgctctacagaaggacatatttccttggatgtgagaccctattttgaaatagagtcctgactcagaacaccaacttaagaatttgggggattaaagatgtgaagaccacagtcttgggttttcatatctggagaagactatttgccatgacgttttgttgccctggtatttggacactcctcagctttaatgggtgtggcccctttagggttagtcctcagactaatgatagtgtctgctttctgcatgaatggcaatatgggactccctccaagctagggtttggcaagtctgccctagagtcatttactctcctctgcctccatttgttaatacagaatcaacatttagtcttcattatcttttttttttttttttgagacagagtttcgatctattttaagtatgtgaagaaaatctacttgtaaaaggctcagatcttaattaaaaggtaattgtagcacattaccaattataaggtgaagaaatgtttttttcccaagtgtgatgcattgttcttcagatgttgaaaagaaagcaaaaaataccttctaacttaagacagaatttttaacaaaatgagcagtaaaagtcacatgaaccactccaaaaatcagtgcattttgcatatttttaaacaaagacagcttgttgaatactgagaagaggagtgcaaggagaaggtctgtactaacaaagccaaattcctcaagctcttactggactcagttcagagtggtgggccattaaccccaacatggaatttttccatataaatctcaatgaattccctttcatttgaataggcaaacccaaatccatgcaagtgttttaaagcactgtcctgtcttaatcttacatgctgaaagtcttcatggtgatatgcactatattcagtatacgtatgttttcctacttctcttgtaaaactgttgcatgatccaacttcagcaatgaattgtgcctagtggagaacctctatagatcttaaaaaatgaattattctttagcagtgtattactcacatgggtgcaatctttagccccagggaggtcaataatgtcttttaaagccagaagtcacattttaccaatatgcatttatcataattggtgcttaggctgtatattcaagcctgttgtcttaacattttgtataaaaaagaacaacagaaattatctgtcatttgagaagtggcttgacaatcatttgagctttgaaagcagtcactgtggtgtaatatgaatgctgtcctagtggtcatagtaccaagggcacgtgtctccccttggtataactgatttcctttttagtcctctactgctaaataagttaattttgcattttgcagaaagaaacattgattgctaaatctttttgctgctgtgttttggtgttttcatgtttacttgttttatattgatctgttttaagtatgagaggcttatagtgccctccattgtaaatccatagtcatctttttaagcttattgtgtttaagaaagtagctatgtgttaaacagaggtgatggcagcccttccctagcacactggtggaagagaccccttaagaacctgaccccagtgaatgaagctgatgcacagggagcaccaaaggaccttcgttaagtgataattgtcctggcctctcagccatgaccgttatgaggaaatatcccccattcgaacttaacagatgcctcctctccaaagagaattaaaatcgtagcttgtacagatcaagagaatatactgggcagaatgaagtatgtttgtttatttttctttaaaaataaaggattttggaactctggagagtaagaatatagtatagagtttgcctcaacacatgtgagggccaaataacctgctagctaggcagtaataaactctgttacagaagagaaaaagggccgggcacagtggcttattcctgtaatcccaacactgtggaaggccgaggcaggaggatcacttgagtccaggagtttgaaacctacctaggcaacatggtgaaaccttgtctctaccaaaataaaaattagctgggcatggtggcacgtgcctgtggtcccagctacttgggaggctgaggtgggagcctgggaggtcaaggctgcagtgagccatgatcatgccactgcactccatcctgggtgacagcaagatcttgtctcaaaaaaaaaaaaaaaaaaaaaaaaaccaggagtgaaaaaggaaagtagaaggcagctgctggcctaaatgttggtttgggaatattaggtgatcctgttgagattctggatccagagcaatttctttagcttttgactttgccaaagtgtagatagcctttatccagcagtattttaagtggggaatgcaacgtgaggccaactgaacaattccccccgtggctgcccagatagtcacagtcaaggttggagagtctccttccagccagtgacctacccaaaccttttgttctgtaaaactgctctggaaataccgggaagcccagttttctcacgtggtttctagcttcttcagactcagcccaaattaggaagtgcagaagcacatgatggtgaaaaacctaggatttggcagccttccagaatggtatggaatctgagggaagatttatgtttcgttttggaggatagctcaagttgaattttctttccagccagttaccctttcaacctacccatactttgtacaactcttacacaaatacttagatatttattagatagccctgaattcactctaattataaacagggagtgtaaactgcccccagatgttcctgggctgggtaaaagcagctggagtgaagcactcattttccataaaggtaacaaagggcagctcagtggttactcaagctcaaaagggtttttttaagagcaagcattggttaagtctgtgtatactgagttggaagtgatttcagcacattcttttttagtggagtgaaagttctgaagcccccttttaacttcctcttggtttttcattataattggtagccatctcatgaactgtctctgactgttgtctctttgtggtcatgtgattgtgagcttgctttctgacttgcatttctgactttatcctgttgttaggaagatagaaactaggttttgaaagattacatgattcaagcgagggattttaaagtaaagatgtatttattctgaagaatctaaaagataacagattatttgcttatgaaagaacaatatagtctgggaatcccagaatgtcaagccaaaggtctaagaagtcatctccttcaaatactttaataaagaagtatttcgaggagatatctgtccaaaaaggtttgactggcctccagattccagttatttttaaaaagcaacttaccactaaatccttgagtctccatagagtaacagtaaagaaactgatgtaacagactctcctctcaaaggatctcctctggaagagactatcagcggcagcattctccagggaagacccatcccctagtgccagagcttgcatcctggagactaaagattgcacttttttgtagttttttgtccaaatgcaatcccatttctgtgcctcttagcatgcagttagatttggacaaacaagattcctaaggaatgactttattaactataatatggttacagctattatataaatatatattctggagctgagatgtggcctgaaccttccctgtatcgatcctttaatttagaactgtcaagatgtcacttt

SEQ ID NO: 148 - DNA, 3984 bp, HOMO SAPIENS
ggaaaaccgaggaatacacatgcgcagttggacccctcaggcccttcgtgtcccttcccacccatctccccgccccggccctctgggcggggctgggccgacagtccagctgcagctcgctggagattcagtgacttccttgttgtgagccccggcccggcagtgtcccgactcgtagccccgctgttcttaatccgggccgctagcctgagtctaggtcgcagccgcagccccaccccgtcggtcaccttttcagcgcaggtcctttccccgcacgccctgcgctccctaacatgcccaaccccagcagcacctcctctccctaccccctccctgaggaaattaggaacctgttggcagatgttgaaacatttgtagcagatatactgaaaggagaaaatttatccaagaaagcaaaggaaaagagagaatcccttattaagaagataaaagatgtaaagtctatctatcttcaggaatttcaagacaaaggtgatgcagaagatggggaagaatatgatgacccttttgctgggcctccagacactatttcattagcctcagaacgatatgataaagacgatgaagccccctctgatggagcccagtttcctccaattgcagcacaagaccttccttttgttctaaaggctggctaccttgaaaaacgcagaaaagatcacagctttctgggatttgaatggcagaaacggtggtgtgctctcagtaaaacggtattctattattatggaagtgataaagacaaacaacagaaaggtgaatttgcaatagatggctacagtgtcagaatgaataacactctaagaaaggatggaaagaaagattgctgttttgaaatctctgctcctgataaacgtatatatcagtttacagcagcttctcccaaagatgctgaagaatgggtacagcagctgaaatttgtattgcaagatatggaatctgatattattcctgaggattatgatgagagaggagaattatatgatgatgttgatcatcctctaccaataagcaatccactaacaagcagtcaaccaatagatgatgaaatttatgaagaacttccagaagaagaagaggacagtgctccagtgaaagtggaagaacaaaggaagatgagtcaggatagtgtccatcacacctcaggggataagagcactgattatgctaatttttaccagggattgtgggattgtactggagctttttctgatgagttgtcatttaagcgtggtgatgtgatttacattcttagcaaggaatacaatagatatggctggtgggtaggagaaatgaagggagccattggcttggtgcctaaagcctacataatggagatgtatgatatttgagagtcctggaaaaggaaaattcttctgcttgtctgcaaatgctttggatttagaagcgtcatgaaagcacgagtgacagctcctaacctctccttgttttattaaacattacttatctttgactgttattttatgcagtcgctcattaaaatattcctctgatgtgaaattaaatgaaggatattaatgtaaattagatgcaaccagttaagttatacctgttgctattttgcaaagaaataattatagtttttatttacccatttgatttgtgtgaagaattcatcactattttatacgtaacatatagtctactatagcatagtatgctactattgctacttctggtgtgatttgtaatgtttcttaatcattggacatcaattatttttagagagtaatgtataatttcatagcattttaaatttagtgtatcatgcgagttttttttggtagatgctgaagaatgtggttgctaaacaaagaatgctaaagaatgttcaaactttatagataactttattgttattatttattttcacacatttaattcctattaagtacagccgcaagaaagaaaaaatgatgaagttgcaaatggcagtgtgctgtcacctgcaacagaagtgcgtaccagaagtatgactcatgcaaagcattttaccgtacaaatatcctggtgcgatgatgggcctggcaacattttctactgtacttttgtttaaatttaatgaaacaaaaaattcctaagaaataccaccctaccactaacaaaatggtataaagaatctcccagccaggccaacatggtgaaaccctgtctctactaaaaattagccaagtgtggtaatgttcacctgcagtcccagctacttgggaggccaaggcacgagaattgcttgaacaaggtaggcagaggttgcagtgagccaagatcgcgccactgcactccagcctgggcgacagagtgagactccatctcagaaaaaaaaaaaaaaaaaaacagaatctcagtgtattctcaaagtaaaaaggcataaccaagcactctcttatcttgccttattgctatactatttacatcccactgcagaacagcagatttgaggcttttctatatacttctcagagcactgaaaagaaaggaagggtttgcagaggagagtgtagaaatcccagtggtagcatgtaccaacaggtgagtagaaaggtagtgttagcctgacatttgagttatactctgtgctgcctgagcaagatttgtagaatcatataattaccttttcatgtatatttgaaatcagaggtgtttaaaatacctatgagataccaatgtagccttaacatatgtcaaaatgcattgctggttagataattatttggactacacataaactcctaatattgaatcattacctatcaggtattatctttatggaacttttcaatatctttgctttataaagattctaaacatgtatctgagctggtaatattttaaaatctccattatttgtgtaaaactgtttataagcagtgtttgagagggtctgctttaccattaccccctcaatatcatgatcatccaatctcaaatgtgaaaaaaaaaaagaaatttgattttaggtattgtgagtaaacaagtttatatagagagacattgtgaagttaaagttttcagaagttacatttgtgcagttcttaccttttcctcatatagtgccattgaaatagactgaaattatcttggcaaaagttagacaaccaaagacgactttagtggactggttttcaaaacttgagcagctgaaaagcaaaagccgttgtttcccatgacaatgtagcctttgtggatttgggtttgtgctttgggttgaaaagaagtttttagtcctaggccagtagatggcagcagcttttcattgcagacaaaacctcttgaaacccttcccccatggcacaaactcgcccatgatggaaagcatctagatttctgcctccttttacagttaatccaggagagggagtcctttgccaactgatgaccaacagttccaagccagatagtctcgtgaacagtgacaatacagaaataaggtgttatttctgttcagatctccaccggcctttgttcttttaaaacttgaatataggtgggagacataagaaaggaaagaaaagacttaaaactggagtgacaggacaaataatcattactttcaattcatgactgctttatattcatttgatgaaatcatttgtatacaaaccagggagagttttctttacacccttgacaatatatcacatactcttcaagatcataataatatcattaatataaatttaaacaacatggcttgttagaaaatatgctaattgctatggtctcattatgtttgcttagcttttatttgtttttctgtgaacagttagagagctaatttttttcaaaggtgattgtaagtcatattttatatagcattttgcttgattatttgctctgtactgaatttgtactctattgccattagatcttacaataatgttccactctgcaaatttttaaggttcaaataaagtttaattgtttgcaaaaaaaaaaaaaaaa

SEQ ID NO: 149 - DNA, 4794 bp, HOMO SAPIENS
cggccgggcgcacccgcggggccctgggctcgctggcttgcgcgcagctgagcggggtgtaggttggaagggccagggccccctggggcgcaagtgggggccggcgccatggaacccccgaccgtcccctcggaaaggagcctgtctctgtcactgcccgggccccgggagggccaggccaccctgaagcctcccccgcagcacctgtggcggcagcctcggacccccatccgtatccagcagcgcggctactccgacagcgcggagcgcgccgagcgggagcggcagccgcaccggcccatagagcgcgccgatgccatggacaccagcgaccggcccggcctgcgcacgacccgcatgtcctggccctcgtccttccatggcactggcaccggcagcggcggcgcgggcggaggcagcagcaggcgcttcgaggcagagaatgggccgacaccatctcctggccgcagccccctggactcgcaggcgagcccaggactcgtgctgcacgccggggcggccaccagccagcgccgggagtccttcctgtaccgctcagacagcgactatgacatgtcacccaagaccatgtcccggaactcatcggtcaccagcgaggcgcacgctgaagacctcatcgtaacaccatttgctcaggtgctggccagcctccggagcgtccgtagcaacttctcactcctgaccaatgtgcccgttcccagtaacaagcggtccccgctgggcggccccacccctgtctgcaaggccacgctgtcagaagaaacgtgtcagcagttggcccgggagactctggaggagctggactggtgtctggagcagctggagaccatgcagacctatcgctctgtcagcgagatggcctcgcacaagttcaaaaggatgttgaaccgtgagctcacacacctgtcagaaatgagcaggtccggaaaccaggtctcagagtacatttccacaacattcctggacaaacagaatgaagtggagatcccatcacccacgatgaaggaacgagaaaaacagcaagcgccgcgaccaagaccctcccagccgcccccgccccctgtaccacacttacagcccatgtcccaaatcacagggttgaaaaagttgatgcatagtaacagcctgaacaactctaacattccccgatttggggtgaagaccgatcaagaagagctcctggcccaagaactggagaacctgaacaagtggggcctgaacatcttttgcgtgtcggattacgctggaggccgctcactcacctgcatcatgtacatgatattccaggagcgggacctgctgaagaaattccgcatccctgtggacacgatggtgacatacatgctgacgctggaggatcactaccacgctgacgtggcctaccataacagcctgcacgcagctgacgtgctgcagtccacccacgtactgctggccacgcctgcactagatgcagtgttcacggacctggagattctcgccgccctcttcgcggctgccatccacgatgtggatcaccctggggtctccaaccagttcctcatcaacaccaattcggagctggcgctcatgtacaacgatgagtcggtgctcgagaatcaccacctggccgtgggcttcaagctgctgcaggaggacaactgcgacatcttccagaacctcagcaagcgccagcggcagagcctacgcaagatggtcatcgacatggtgctggccacggacatgtccaagcacatgaccctcctggctgacctgaagaccatggtggagaccaagaaagtgaccagctcaggggtcctcctgctagataactactccgaccgcatccaggtcctccggaacatggtgcactgtgccgacctcagcaaccccaccaagccgctggagctgtaccgccagtggacagaccgcatcatggccgagttcttccagcagggtgaccgagagcgcgagcgtggcatggaaatcagccccatgtgtgacaagcacactgcctccgtggagaagtctcaggtgggttttattgactacattgtgcacccattgtgggagacctgggcggaccttgtccacccagatgcccaggagatcttggacactttggaggacaaccgggactggtactacagcgccatccggcagagcccatctccgccacccgaggaggagtcaagggggccaggccacccacccctgcctgacaagttccagtttgagctgacgctggaggaggaagaggaggaagaaatatcaatggcccagataccgtgcacagcccaagaggcattgactgcgcagggattgtcaggagtcgaggaagctctggatgcaaccatagcctgggaggcatccccggcccaggagtcgttggaagttatggcacaggaagcatccctggaggccgagctggaggcagtgtatttgacacagcaggcacagtccacaggcagtgcacctgtggctccggatgagttctcgtcccgggaggaattcgtggttgctgtaagccacagcagcccctctgccctggctcttcaaagcccccttctccctgcttggaggaccctgtctgtttcagagcatgccccgggcctcccgggcctcccctccacggcggccgaggtggaggcccaacgagagcaccaggctgccaagagggcttgcagtgcctgcgcagggacatttggggaggacacatccgcactcccagctcctggtggcggggggtcaggtggagaccctacctgatccccagacctctgtccctgttcccctccactcctcccctcactcccctgctcccccgaccacctcctcctctgcctcaaagactcttgtcctcttgtccctcctgagaaaaaagaaaacgaaaagtggggtttttttctgttttctttttttcccctttccccctgcccccacccacggggcctttttttggaggtgggggctggggaatgaggggctgaggtcccggaagggattttatttttttgaattttaattgtaacatttttagaaaaagaacaaaaaaagaaaaaaaaaagaaagaaacacagcaactgtagatgctcctgttcctggttcccgctttccacttccaaatccctcccctcaccttcccccactgccccccaagttccaggctcagtcttccagccgcctggggagtctctacctgggcccaagcaggtgtggggcctccttctgggcttttcttctgaatttagaggatttctagaacgtggtcaggaatagccattctaggcggggctggggccagggtggggggcagtcactgtgggaggtcccagctccagcccccctctggtttgctgcctcctctcccctctaaaaaagtcttccgcttgattttgcacaatcccggcgatactcctggcgatactgactagaaagtcagggagctgggggagctgttcactttaggatacgggggtggtatggaagggagcgttcacaccgccagcctcgggcctgggatttgaggagggccctagacctcctccactctccatcccctttcccttccactttgggttcactttgaattttctccgttttttggggcagtggctctgatccactcacccccccgccccccgccccacttctagctgcttctcctcttgtttctgccttaataattcccacggccacaggcaagggggttgcagtggccgcctgcaccttggatgaggcagggccaggcgcccagaacccccatcctggccgcacccccctttccagggtcctccggaccccaccttccacactctgatcacagcccccctaccttttgccctaggaggaagcaataatggtgtataccctcattctcattcctgggcagcccttccttccaccctggcaccaaaataatttctcctccatccgtaccttgcctagcctctccctctcccccagctagtccctgagcaatacggcagacagatgcaagaccatttttctccaagccatgggggactgtttggaaggaaagccccctctctccctcctcccctcgccctcggcctggttctgcagctggaccgacctcattcatcgcctgccccctacccaattctgagcacacggtactgtagcccccagttcctccctagccttccatccctctgtccaccccagggggaggtaaccccgcactcacactcccttgatgctgtctgtacagggttcatattttgtagcgaaagtcgtttttgtcccagccggcgatcggagtgggccttttctttctttttgttcattctttacctttttttcttttctttctttcttttttgtacatactgtaaggttggtttgtaaattattctacggaggcaaaaagggaaaataaaaacttgcccttccctggctgacccagtcgggaaggtagggaaggaggtctcccgttgggagagtctctgttcctgctgtattatacaaactgtaccatagtcctgggaaaagggtggactcaccgctgttgttttatgggaagtcgtgtcatcctaggggttggggctgggcagagcctgtcccctccccccttctccaggagccagggggtgactggagagacagacccacccccaagcagggctcctctccccagggtgagcacaggacctctgtaagctgcttgtgtattgtccactttgacgatcagtcattcggtccgttgatcaataatccttcgatcttgtctccaattaaaccgaggctttcaccgataaaaaaaaaaaaaaa

SEQ ID NO: 150 - DNA, 3877 bp, HOMO SAPIENS
gaaagaggagccggaagtgtggcgcgcgaggtctaagggcgcgagggaagtggcgggcggggactaaggcggggcgtgcaggtagccggccggccgggggtcgcgggtatggccgaggccaggaagcggcgggagctacttcccctgatctaccaccatctgctgcgggctggctatgtgcgtgcggcgcgggaagtgaaggagcagagcggccagaagtgtttcctggctcagcccgtaacccttctggacatctatacacactggcaacaaacctcagagcttggtcggaagcggaaggcagaggaagatgcggcactgcaagctaagaaaacccgtgtgtcagaccccatcagcacctcggagagctcggaagaggaggaagaagcagaagccgaaaccgccaaagccaccccaagactagcatctaccaactcctcagtcctgggggcggacttgccatcaagcatgaaagaaaaagccaaggcagagacagagaaagctggcaagactgggaattccatgccacaccctgccactgggaagacggtggccaaccttctttctgggaagtctcccaggaagtcagcagagccctcagcaaatactacgttggtctcagaaactgaggaggagggcagcgtcccggcctttggagctgctgccaagcctgggatggtgtcagcgggccaggccgacagctccagcgaggacacctccagctccagtgatgagacagacgtggaggggaaaccctcagtaaaaccagcccaggtcaaagcctcatcagtttctactaaggagtctccagcaagaaaggcggccccagcccctgggaaggtgggggatgtgacaccccaggtcaaaggaggggccctgcccccagccaagagggccaagaagccagaagaggagtcagagagtagtgaggagggatctgaaagtgaggaggaggcccctgcagggacacgaagccaggtaaaggcctctgaaaaaattctccaggtcagagctgcctcagcccctgccaaggggacccctgggaaaggggctaccccagcaccccctgggaaggcaggggctgtagcctcccagaccaaggcagggaagccagaggaggactcagagagcagcagcgaggagtcatctgacagtgaggaggagacgccagctgccaaggccctgcttcaggcgaaggcctcaggaaaaacctctcaggtcggagctgcctcagcccctgccaaggagtcccccaggaaaggagctgccccagcgccccctgggaagacagggcctgcagttgccaaggcccaggcggggaagcgggaggaggactcgcagagcagcagcgaggaatcggacagtgaggaggaggcgcctgctcaggcgaagccttcagggaaggccccccaggtcagagccgcctcggcccctgccaaggagtcccccaggaaaggggctgccccagcacctcctaggaaaacagggcctgcagccgcccaggtccaggtggggaagcaggaggaggactcaagaagcagcagcgaggagtcagacagtgacagagaggcactggcagccatgaatgcagctcaggtgaagcccttggggaaaagcccccaggtgaaacctgcctctaccatgggcatggggcccttggggaaaggcgccggcccagtgccacccgggaaggtggggcctgcaaccccctcagcccaggtggggaagtgggaggaggactcagagagcagtagtgaggagtcatcagacagcagtgatggagaggtgcccacagctgtggccccggctcaggaaaagtccttggggaacatcctccaggccaaacccacctccagtcctgccaaggggccccctcagaaggcagggcctgtagccgtccaggtcaaggctgaaaagcccatggacaactcggagagcagcgaggagtcatcggacagtgcggacagtgaggaggcaccagcagccatgactgcagctcaggcaaaaccagctctgaaaattcctcagaccaaggcctgcccaaagaaaaccaataccactgcatctgccaaggtcgcccctgtgcgagtgggcacccaagccccccggaaagcaggaactgcgacttctccagcaggctcatccccagctgtggctgggggcacccagagaccagcagaggattcttcaagcagtgaggaatcagatagtgaggaagagaagacaggtcttgcagtaaccgtgggacaggcaaagtctgtggggaaaggcctccaggtgaaagcagcctcagtgcctgtcaaggggtccttggggcaagggactgctccagtactccctgggaagacggggcctacagtcacccaggtgaaagctgaaaagcaggaagactctgagagcagtgaggaggaatcagacagtgaggaagcagctgcatctccagcacaggtgaaaacctcagtaaagaaaacccaggccaaagccaacccagctgccgccagagcaccttcagcaaaagggacaatttcagcccctggaaaagttgtcactgcagctgctcaagccaagcagaggtctccatccaaggtgaagccaccagtgagaaacccccagaacagtaccgtcttggcgaggggcccagcatctgtgccatctgtggggaaggccgtggctacagcagctcaggcccagacagggccagaggaggactcagggagcagtgaggaggagtcagacagtgaggaggaggcggagacgctggctcaggtgaagccttcagggaagacccaccagatcagagctgccttggctcctgccaaggagtcccccaggaaaggggctgccccaacacctcctgggaagacagggccttcggctgcccaggcagggaagcaggatgactcagggagcagcagcgaggaatcagacagtgatggggaggcaccggcagctgtgacctctgcccaggaccaggagtcttcttgaatcccatgagctctgcccaggaccctctctcaagcacctgtggcataccttcatgtgctccactgcacccagagcttaagccacagtcctgctcaggctacacctccaagggtgggaccaggcccaccttatcttcctgtactccagaggcccaagtcagccatgctggtgtggtccaagcttctgtgtgaaccctggcccttccatcagacagcattaccctttgtcctcctctagccccaagctcccagaagcttctgccaggcacctcagagcaccagctcccctgtcccagggcctaaccacagatcctggagttctgcaacctccagaccagagcggtctcatgaaccacctccccttgaatatcacataccacattgttatcaattcatcagtaaggtcagatgctgtttgcacacctccagcaatagggtgctcactgcctctcactttccaatggcacagattacaaaagtaaagaacaaccaccaccaacatcggtaactccctgtattctcatttttctgtttaatctccacaacagccctatgagggtggctccctttgttgtttgcattttaaggaactgggagtgaggctcagagaagttgagggacctgtcccagcatcacatggctgatgacaagtggacagacctggtgtttgagcacaggccattcacattctgacccgttgcctggtgctgccccgacactctcctctcctgggcttgggcattgccctctggctctgtgtggagcctttacgaggccacctgcctctctgagggatctaaacaactgggagggaggggaccgctccccctttctctgtgggggtggactaacacaattaaaatgaacatcctgcttaaaaaaaaaaaaaaaaa

SEQ ID NO: 151 - DNA, 6863 bp, HOMO SAPIENS
cttgttcctccgccgttgcaatgaactattttctctcagtccggggtggtacttttgagtaaccccttccaaatagaaacccataccagcctatttagctcggtctccactatatgaaggtttcctagggcttggtgtgacgcaacgtatacgaggctcggaaggacaccccgcggaaggatccggtttgttgtggtgtggggaggggagacgctgacaaaccaagatggcggcggcggcgctgaaggccgcggcgtttgggaggtaactgtggtggcgaaggctgcggtagtggggaggcaaccacacagtttggaagaaacggagcgggacgaagaggcggtagcagtagagtcagcctgagactctcagagcacgacggccacacgcccccttaggccctcggcgggcggcggctgccccgcttagggcctagcctccgagcattgcctcggcttcaaacagcggcggcgccatgagtccttaagggcggtccaagcctcccgatccctggcccagacctcgggcccaccatggagccggggtccgacgatttcctaccgccaccggagtgcccggtgttcgagcctagctgggccgagttccgagaccctcttggctacatcgcgaaaatcaggcccatcgcagagaaatcgggcatttgcaagatccgcccacccgcggactggcagccaccctttgctgtggaagtggacaacttcaggtttaccccccgaatccagaggctgaatgagctagaggcccagacgagagtgaaactgaactacttggaccagattgccaaattctgggaaatccagggctcctccttaaagattcccaatgtagaacggcggatcttggacctctacagtctcagcaaaattgtggtggaggaaggtggttatgaagctatctgcaaggaccgtcggtgggctcgggtagcccagcgcctcaactatccaccaggcaaaaatattggctccttgctacgctcccactacgaacgcattgtttatccctatgaaatgtaccagtctggagccaaccttgtgcagtgtaacacacgtccatttgataatgaggagaaggacaaggaatacaaaccccacagcatccccctacgacagtctgtgcagccttccaagttcaacagctatggccggcgggccaagagactgcagcctgatccggaacccacagaggaagacattgagaagaatccagagctgaaaaagctacagatctatggggcaggccccaagatgatgggcctgggcctcatggccaaagacaagactctgcggaagaaagataaggaggggcctgagtgtccccccacagtagtggtgaaggaggagttaggtggggatgtgaaggtggagtcaacatcgcctaagaccttcctggagagcaaggaggagctgagtcacagcccagaaccctgcaccaagatgaccatgaggctacggaggaaccacagcaatgcccagtttattgagtcatatgtctgccggatgtgttctcgaggggatgaggatgacaagctcctgctgtgtgatggctgtgatgacaactaccacatcttctgcctgctgcctcctctgcctgagatccccaagggtgtctggcggtgcccaaagtgtgtcatggcggagtgtaagcggcccccagaagcctttggctttgagcaggctacccgggaatacactctgcagagctttggcgagatggccgactcctttaaagctgactacttcaacatgcccgtgcatatggtgcccacagaacttgtggagaaggagttctggaggctggtaaatagcattgaggaagatgtgactgttgagtatggagctgacatccattccaaagaatttggcagcggtttccctgtcagtgacagtaaacggcacctaacccccgaagaggaggagtatgctaccagtggttggaacctaaatgtgatgccggtgttggaacagtctgtactgtgccacatcaatgcagatatctctggcatgaaggtgccctggctctacgtgggcatggtcttctcagccttttgctggcatattgaggatcactggagttactccattaactacctccactggggtgagccgaagacctggtatggggtgccctcacttgcagcagaacatttggaagaagtgatgaagaagctgacacctgaactatttgatagccagcctgacctcctgcaccaacttgtcaccctcatgaatcccaacaccctcatgtcccatggtgtgccagttgtccgcacaaaccagtgtgcaggagagtttgtcatcaccttcccccgtgcttaccacagcggcttcaaccaaggctacaactttgccgaggctgtcaacttttgcactgctgactggttgcctgctgggcgccagtgcattgagcactaccgccggctccggagatactgcgtcttctcccatgaggagcttatctgcaagatggctgcctgcccagagaagctagacctgaacctggcggcagctgtgcataaggagatgttcatcatggtgcaagaagagcggcgtctacgaaaggccctgctggagaagggtatcacagaggctgagcgagaggctttcgagctgctcccagatgatgagcgccagtgtatcaagtgcaagactacgtgtttcctgtcagccctggcctgctacgactgcccagacggccttgtctgcctttcccacatcaatgatctctgcaagtgctccagtagccggcagtacctgcggtatcggtataccttggatgagcttcctgccatgctgcataagctgaaggttcgggctgagtcctttgacacctgggccaacaaagtgcgagtggccctggaggtggaggatgggcggaagcgcagccttgaagaactgagggcactagagtctgaagcccgtgagcggaggtttcctaatagtgagctgctgcagcaactaaagaactgcctgagtgaggcagaggcttgcgtgtcccgagctctgggactggtcagcggccaggaagctggcccccacagggtggctggtctacagatgaccctgactgagctccgggcctttctggaccagatgaacaacctgccttgcgccatgcaccagattggggatgtcaagggtgttctggaacaggtggaggcctaccaggctgaggctcgtgaggccctggcctcactgccctccagtccagggctactgcagtccctgttggagagggggcggcagctgggggtggaggtgcctgaggcccagcagctccagcggcaggtggaacaggcgcgatggctggatgaggtgaaacgcacactggccccctcagcccgaaggggcaccttggctgtcatgcgaggactgttggtcgcgggtgccagtgtagcccctagccctgctgtggataaagcccaggccgagctgcaggaactgctgaccattgctgaacgctgggaggagaaagcccacctctgcctggaggccaggcagaagcatccaccagccacacttgaggccataatccgtgaagcggaaaacatccctgttcacctgcccaacatccaggctctcaaggaggctcttgctaaggcccgggcctggattgctgatgttgatgagatccaaaatggtgaccactacccctgcctggatgacttggagggcctagtagctgtgggccgggacctacctgtggggctggaggagctgagacagctagagctacaggtactgacagcgcactcctggagggagaaggcctccaagaccttcctcaagaaaaattcttgctacacgctgctggaggttctctgcccatgtgcagatgccggctcagacagcaccaagcgcagccggtggatggagaaggagctggggttgtacaaatctgacacagagctgctggggctgtctgcgcaggacctcagggacccaggctctgtgatcgtggccttcaaggagggggaacagaaggagaaggagggtatcctgcagctgcgtcgcaccaattcggccaagcccagtccactggcatcatcgagcacggcctcctctacaacctctatctgtgtgtgtgggcaggtgctggctggggcgggagctctgcagtgtgacctgtgtcaggactggttccatgggcggtgtgtgtcagtgcctcgcctcctcagctctccgaggcccaatcccacctcatccccactgctggcctggtgggaatgggacaccaaattcctgtgtccactgtgtatgcgctcaaggcgcccgcgcctggagaccatcctggcactgctggtagccctgcagagactgcctgtgcggctgcccgagggcgaggccctgcagtgcctcacagagagggccatcagctggcaaggccgcgccaggcaggctctggcctctgaagatgtgactgctcttttgggacggctggctgagctccgccaacggctacaggctgaacctagacctgaggagcctcctaactaccctgcagcccctgcttctgaccccctcagagagggcagtggcaaggatatgcctaaggtccagggcttactggagaatggagacagtgtgaccagtcctgagaaggtagccccggaggagggctcaggtaagagagatctggagctgctgtcctcgctgttgccacagttgactggccctgtgttggaactgcctgaggcaacccgggcccccttggaggagctcatgatggagggggacctgctcgaggtgaccctggatgagaaccacagcatatggcagctgctgcaggctggacagcccccagacctggagaggatccgcacacttctggagctggagaaggcagagcgtcacgggagtcgggctcggggccgggccctggagaggcggcggcggcggaaggtggatcggggtggggagggcgatgacccagcccgagaggagctagagccaaagagggtacggagctcagggccagaggctgaggaggtccaggaggaggaagagctggaggaggagactgggggtgagggcccccctgcacccatccccaccactggcagccccagcacccaggagaaccagaatggcttggaaccggcggaagggaccacttcaggcccctcggcccctttctccactctgactccccggctgcatctgccctgcccacagcagccgcctcagcaacagttgtgacagtggctgagcctagcacagaccctgacagagacccccctcggcctcaaggatcctctttctgaccatcaagcctgcttcttggggggtgggcgggtaggggggtggccatccctgctacccgcccacccctgagtcccttgacttttgtattctgactccaaggtattgttcagacctcagctcctgggggccggcccctggagtcttccctccctggtagcctctaaccagcattcccagacacctgaggcagatagatggatgggctggtgggcaggggggtggctggggctgggccatcaccattccagagacaaggccagtgtatatgcaaactgggggactctcctcccttctctccccagttctggtcctggccaggccatgctacactaacccctgcccccactctcctcccctcttttccttccttcctacccccttctccctctcccttcccctgactgttccacccaggaggaggaaacttcacatagccgtgctcacagttttttattttaaaggaatttggctggggagctgaacagggctccctgtgatctgaagaaagcttttggtgcttgtcctcacaaccacctcagtcctccctccctgtcctcccctgtctcctttcctcctcctgggttcatgttgtaataaaagaagattgttggtgtgtaattaatttgttcaaaagaaaaaaaaaagcaaaacaagaaacttggttccaactgaagcctattttaattttattttattattttcctcttgttagaaataaaacccttagaaacattttttggaaacatgtttctgaagtgcatttctcttagacggggaagacagtgcttccatcaccagtcagtggagcagctgtagtgctggcaggagcactagggctgaagccagggagctctgggttctgaaatcaagttccaccagcttcttaaccttgggcaagacattctgatcctcccccgactctaaccccaagccactttccctcaagtccaaacagatgggctcgggccccctcacccaaactcctacactacaacctcccccagttgatgccctccagtttatcctcctcaagctcccaaagggatttttttgttaatggctttattgagatataatttacatactataaaattcacttgtttgaaatgtacaattcagtgatttggggggtttctaaagtgtagatctgattatatactgcttaaaaccttccatgatgctttattgcccttaagattatacatagaatctcgttcttcctagaatgttttcctgtctaacccatctactgcataattccctgatttttctccacaggttatgcccctgatgaatggggactaaagctcagatgtgtggtcatttgcaacccctgagttcacttttttaagacagcttattgatatatataatgtacataccatacagtcacccacttaaaagtatacaattaaatagcttttagtatattcagagttgtgcagccatcattcgaaaaaaaatttcagaacattttcatcactgcagaaagaaactccatatcccttaggcgtcctttacccctcatcccatttgcctattctggacattttacataaatggaatcgtataatatgtgaa

SEQ ID NO: 152 - DNA, 5943 bp, HOMO SAPIENS
ccctttcaaagatggccgccctgttgttttgatgaataatacttggtggggcgagggggaaagagtaggggtggaggggtaggaggatttactcttccagcgagagctacgcgcatcccatcctccccctcccccctacccgggctccggcgtggaggcggggcgtggccggcctgctttgggaggggaggggcttcccttacagtgctgggctctgccaggacggctgtggggtcgccttacctcggggtatccactctgcagtcgaccagttcccgccaggagcaaagggtaggaaggagagcaggatctgctgtaggaacgcagctaccgcgccactatcacgaagaaacagcaggctcggggcacgagacgaactggagaccgcgctgcctagctgggtaacctgggaagcagagggtaataagtggcgccttaagacaaccctgtagcagcagcagtggcggccaaaggaggctgctcagggaacaagcggctgtagtagtctgtggggcgactggagtgaccgaagccaaggcagtttagtgcctctcgtgttcttattttttaacctctgactatgcaattctgaaacctcccccattcgggggaccagacagcctgatagacaccttccactctccttcctcccgccgtggtctcgagaacagaaggatctctccttaacgcctttcaccattaagaggaaagcgatggaggagctgagcgctgatgagattcgacggaggcgccttgcacgacttgctggtggacagacctctcagccaaccaccccactcacctctccccagagggagaaccctccggggcctcccatagcggcatcagccccaggaccctctcagagtcttggtctcaatgtccacaacatgaccccagctacctccccaataggtgcatcaggagtagcccatcgaagccagagcagtgaaggagtcagttctctcagcagctcgccctctaatagccttgaaacgcaatctcagtctctctcacgttcccagagcatggatatcgatggtgtctcatgtgagaaaagcatgtcccaggtggatgtggattcaggaattgaaaacatggaggttgatgaaaatgatcgaagagaaaagcggagcctcagtgataaggagccttcctcgggccctgaagtgtctgaagagcaggccttacagctggtctgtaagatcttccgtgtctcttggaaggaccgggacagagatgtcatctttctttcttctctttctgcacagtttaagcagaacccaaaagaagtattctccgattttaaggacttgattggccagattttaatggaagtgctaatgatgtccactcagaccagagatgaaaacccatttgccagtctgacagccacatcacagccaattgctgcagcagcacggtcaccagacagaaatctcttgctaaacactggctccaatccaggaacaagccccatgttctgcagcgtggcttcctttggtgccagctctttgtctagcctctatgaaagtagtccggctcccactcccagtttctggagctctgttcccgtgatgggcccgtctcttgcctcaccttcccgtgcagccagccagttggctgtgccttccactcccctcagtcctcacagtgcagcctctggaactgctgcgggaagccagccttcatccccgcggtatcgcccctacactgtcactcacccatgggcgtcctcaggcgtctccattctgtcgagctccccaagtccccctgccctcgccagtagcccccaagcagtgcccgccagcagttccagacagaggcccagcagcacgggtccacccctaccacccgcctcacccagtgccacgagcagacgcccctcctccctgaggatctctcctagtttgggagcctctggtggagcaagtaattgggattcctacagtgaccatttcaccattgaaacctgcaaagagacagatatgctgaactacctcatcgagtgtttcgaccgagttggaatagaggaaaaaaaagcaccaaagatgtgcagccagccagcagtcagccagcttctgagcaacatccgctcacagtgcatatcccatactgctttagtactacaaggctccctaacacagcccaggtccttgcagcagccgtccttcctagtgccgtatatgctgtgtaggaatctcccatatggcttcattcaggaactggtgagaaccactcaccaggatgaagaagtgttcaagcagatatttatccccattttacaaggcctggctcttgctgccaaagagtgctccctcgacagtgactactttaaataccccctcatggcactaggtgagctctgtgaaaccaagtttgggaagacacaccctgtgtgcaatttggttgcttctttgcggttgtggttgccgaaatccttaagtcctggctgtgggcgggagctgcagagactctcttacttaggggctttctttagcttctcagtctttgcagaagatgatgttaaagtggttgaaaaatacttctcagggcctgccattaccctggaaaacactcgtgtggttagccaatcattgcagcattacttagagctcggaaggcaagagctttttaagattctgcatagtattttgttaaatggcgaaacccgtgaggctgctctcagttacatggcggctgtcgtcaatgccaatatgaagaaagcacagatgcagacagatgatagattggtgtctacagatggatttatgctgaatttcctttgggtactgcagcagctaagtacaaaaatcaagttagaaacagttgatcccacgtatatttttcacccaagatgtcggattactcttcccaatgatgagacgcgtgtgaatgcaacgatggaagatgtgaatgactggctgactgaactctatggcgatcagcctccattttctgagccgaaattccctacggagtgcttctttctcaccctgcatgctcaccacctctctattctgcctagttgccgtcgctatatccgcagactccgggctatccgggagctcaatagaactgtagaagatttgaaaaataatgaaagccaatggaaagattccccactggcaactagacaccgcgaaatgctgaagcgctgtaaaactcagcttaagaaactggtacggtgcaaggcctgtgctgatgctggcctacttgacgagagcttcctgagaagatgtctgaatttttatggccttctcattcagctgctgctccgcatcctggaccccgcatatcccgatataacactgcctttaaattcagatgtccccaaggtatttgcagcgttgcctgagttttatgtagaagatgttgcagaatttttattttttattgtacaatactctccccaggcgctttatgagccctgtactcaggatattgtgatgttccttgttgtgatgttgtgcaaccagaactacatccgaaacccatatttggtggccaaactggtagaagtcatgtttatgaccaaccctgctgttcagccacgaacccagaagttttttgaaatgattgagaaccatcctctctccaccaagttgttggtaccttccctgatgaagttttatacagatgttgagcataccggagccaccagtgagttttatgacaagttcacaattcgctatcatattagcaccatttttaaaagcctttggcaaaacatagctcaccatggcacctttatggaggagttcaactccgggaagcagtttgttcgctatataaacatgttgataaacgacacgacgtttttgctcgatgaaagtctggagtctctgaagcgaatccatgaagtgcaggaagagatgaagaacaaagaacagtgggaccagttgccccgggatcagcagcaggctcgtcagtctcagcttgctcaggatgagcgtgtgtcccgctcttacctcgccctggccaccgaaaccgtggacatgttccacatcctcacgaagcaggtccagaagcccttcctcagaccggagcttggaccccgattggctgcaatgctgaactttaatcttcagcaactttgtggccccaagtgccgtgacctgaaagttgaaaaccctgagaaatacggctttgaaccaaagaagctgttggaccaactgacggatatttacttacagctggactgtgctcggttcgcgaaagccattgctgacgaccagagatcctacagtaaggaattgtttgaagaagttatttcaaagatgcggaaggcagggatcaaatccacaatagcaatagaaaaatttaagctgctcgccgagaaagtggaggagatagtggccaagaacgcacgcgcagaaatcgactacagcgacgctcctgatgagttcagagaccctctgatggacaccctcatgacagaccccgtgcggctgccctctggcaccatcatggaccgctccatcatcctgcggcacctgctcaactcccccacggaccccttcaaccggcagacgctgacagagagcatgctggaaccagtgccagaactgaaagagcagattcaggcgtggatgagagagaaacagaacagcgatcactaaaccgttccgccgcccaccctctgctagacacagccaaggccaacgaggcaagcagaagcagcggccgcagcgaagctgccgttcatgtgttggaggccaaatgtggcaaaccaaccccaggcccacccagagcgagcaaacgctgagacctgaaaggacatggatgagaagaggagcccgcttcctgtacatatatttaagtgacaaacacggtcaaaagcttaagggacaggttttatggttgcttgtgtaataaagcatgtccttcgtatgtcacagtttggggcaacggaagtcttttagtgatggctaatgggtctgggcagcatcccttcatgaatttttttttaatccaatatccgttgatttgattgtgattagagaaccttggacattttgctgctaaagaatcttttttcccctctcccccttcctgaccctacttgcactgctgtggatttttttaagagaagcaaaaacaaaagtaaactcctttccctggccctccaaacatatattctgtgagataactgtgcctgctaccaagtgttaatcctgggatcgtatttttatatcatattcacatatttgtttttttaattggtgttagatgacatgattaataaaaaaggcaagatattttcagaatttgaatttcagttttttttttcttttgaaatgtccctttaagatttttttattctaaacaaaataaagaaaatcctgctgctctggtccttgtgataagcctctcttcggcatctgaggagcagctgcagcaaaatctaggggtgtaagtgtatcaggacttatgtgacttatattttggggagatgagggttgggttttttttttaatgctacgtgacagtttgaaaccttcacagttatcctctgggggtaaatcaattcttcaacccttgggtgtgtgagtttgaggcagggtcatttgtgtgatgtgtttggccttaccaaagcaaaagagggtgcaagaatgtgggagtatgtctgccggtttcaacacacacagacaaacacagccacacgcgcacacaagtataagactttttgtattactgctccctacttaacatacttgaattctcaaatttcctttggggtaaaaaaaaaaaaaggatttgaaaccataaagtgttctgaagaaattaagtctataaaaagcatactttcttttttcttttccttttttccctccacagacaatgtcctctgttcaattcctaacgcaaactacaataaatggtgacacacgttcagaagaaaaaaaaaaaaaaaaaaaaaaaaaaaaaaaaaaaaaaaaa

SEQ ID NO: 153 - DNA, 913 bp, HOMO SAPIENS
agattttcaggttgattgatgtgggacagcagccacaatgaggaactcctatagatttctggcatcctctctctcagttgtcgtttctctcctgctaattcctgaagatgtctgtgaaaaaattattggaggaaatgaagtaactcctcattcaagaccctacatggtcctacttagtcttgacagaaaaaccatctgtgctggggctttgattgcaaaagactgggtgttgactgcagctcactgtaacttgaacaaaaggtcccaggtcattcttggggctcactcaataaccagggaagagccaacaaaacagataatgcttgttaagaaagagtttccctatccatgctatgacccagccacacgcgaaggtgaccttaaacttttacagctgacggaaaaagcaaaaattaacaaatatgtgactatccttcatctacctaaaaagggggatgatgtgaaaccaggaaccatgtgccaagttgcagggtggggcaggactcacaatagtgcatcttggtccgatactctgagagaagtcaatatcaccatcatagacagaaaagtctgcaatgatcgaaatcactataattttaaccctgtgattggaatgaatatggtttgtgctggaagcctccgaggtggaagagactcgtgcaatggagattctggaagccctttgttgtgcgagggtgttttccgaggggtcacttcctttggccttgaaaataaatgcggagaccctcgtgggcctggtgtctatattcttctctcaaagaaacacctcaactggataattatgactatcaagggagcagtttaaataaccgtttcctttcatttactgtggcttcttaatcttttcacaaataaaatcaatttgcatgactgtaaaaaaaaaaaaaaaaaa

SEQ ID NO: 154 - DNA, 4355 bp, HOMO SAPIENS
gagggaggacgaggacgggggcggcggctgctgcgagggggggcccgtgctctccccgtttcccttagtcgcactcaggcagccgccgccgccgccgctgccgccatgttggtttgagaggcgatgacaggaggcggccgcggcgtgtgggactgaaaagtgaaggaggaggaggagaaacaaagctctgagaggaaaccattcccgggctgaggagaaggaggacccggcctcttccggggaccagccgaagtcggcgtcgcccggagctcgcgaggccggggaggggaggggaagggaaggcggagaccggggaggcggcggcggggaaggcggaggcagaagaggagtggcgaggagccggagacgatgcgccccgaccccagctgctgtccggaggcgcccgcggcctgagcccagaggggctgtggagtgtcccggccggccccgagcacccccgcgctgtcggtcccccgctccggtctttcgctttggcttccaactagttaaatgcccttgagcgcgggtttccgcggcccggctcttcgcccccgcggcgcgagttgagccgtttccccgcgctgtccgcgcgggcgctccgacagcggctctgcagggtccgcggccagcgtccggccaccgctcggccgccactcaaggctcacgcgtcgatgtgtagctacatagttatctgtgtacatccacgctggggcatttttctcctgcttaatgaggacttgactcgggagcaagtgtgaatcattgccggggctgggaaaggaggaaggcgcatttaaccccctcccacccctctccatgtccgtgtgtcactcggctcggtccacctggcgcggccggtcctggggctgctgctgctgttgacgacgacgacgacgacgggggctgcctctgctgtcccgggagtttcctcctgctccggccacacagctcctggggattgttcctcttcgaaccagaacctcggcctgaccggcactttggctccaaaataactttatttttgggggagaaagcacatcacgaaccagtcaaaatcgtggtttatttctgtaacgtgaagacttctgctcttttttctttgtttgtttttttcgtaaacatctgggtgtatatcaaacggcaagatgtccagtaatgtcccggcggatatgataaatttgcgcctcattttggtaagcggaaaaacaaaagagttcctgttttctcctaacgattctgcttctgacattgcaaagcatgtatatgacaattggccaatggactgggaagaagagcaggtcagcagtccaaatattctacgacttatttatcaaggacgatttctacatggaaatgtcacattaggagcattaaaacttccttttggcaaaacaacagtgatgcatttggtggccagagagacattaccagagccaaactctcaaggtcagaggaatcgtgagaagactggagagagtaattgttgtgtaatcctgtaaacactgtctgcctagtgtgatgtgatatagtctttgtctttcatgctgctgggacagaaaagacccgacattgcttcagaaaccgttcagaacagtctgcctgtaaacacatggaactgaattaccacatgaacactgtcatcttttctcatgaaagtaaaaagaaccaagaacatttttcactctgattttttatttcttgtattttttgttgagctgttttaacacatattggtttttgaatgcagtcaatctccaggggaaaagttaacaagttatctttcgtagcagaaaccattttgctgccacaaaattttcatcatcagaactaataaatcaagtgttccaaatacaatttgcattaaaaagattggcattattttcctcatcagcagaatttataacagtgtgtggtatctagaaatacttatatatacaattccacactggaagacactcagcaattaatgaagttaattactgggccaacttgagaggaaaaaatggaaaagaaactaaaatgttgggtgaattctaccaaagtcagccgtggtggctgcactggcacagaatactaaactgagtgtgactattttcactgcaacaaatgaaaaaacaaaatgtgcctgtttaaagcactcagtagagggctgatgaaactaattttttttcctttaagacatgcactcttgagtcctacagtaactgagtgtttgtttagacagcacaagaaggggtgagagtgcgtctcctagccttaatgtgggagggtagtttcagtcactcatcggctttcattattgtgcagaaatattagaaaacctcattgatcaattttatgtatttgaatatcagcaaattgaaattttccataattatcattaatttgtaaccacatccagtgtcatgcttactccttagagttcagatgaattcttaaaattaaaaaaaaactccatagtactaattttgtttctttatatagtttgcgtttgatattagtgcttgcaattgtattaaagtcaaaagctgatttttatggcatacacaagaatgccactttttcttttatttcataccaataatttaaagattgatatgctaaaaacaatttgcacagcactaaagcatgagctactttcatctaaacctgtaaaaatatgaaagatttttatattttttcactgggaagaaattcttcctggatgaaattacaaatatgtgtagaatatatttaataaaagacttataaaatacctaactacaggacttaaaatatagattggcgcgtagtatacagaacaatattccatataaataagtttagcctttataaaaatgaagttgcaggctgacattacattctgtactaagtgtcaacagcccttacaaacattaaatgtaaatggtttcaaatggtcagcgttgtttaaatgtaatcatgttattttattcattgttaatgctttgatgaaaaggctttatatgcagtagatctacgaaaatattgttcatactgatcagaattaaatttgtatagagcagagttttaaaatgaatgtaaatagcactaaacgttttctttctgcaacctgtacttacagattcttcctgtaaactaaataaaaaaaaaatgatagtgcattttggtggtaattttaaaggtcttgattaggtcaataattgtttaagcaccgtctcattcatgttttctactttcatttcttaagcttttaaaattcatttaattaatattctgttgttgttttggggagtattcccaatgtatctttgatatttaacctggttaatttgtggacagtcacaacaatggatagaattatgtagtctccgttatcactaaaatgttatcttcaagagatgttaaatatttatatgctttgttgactagctgaaatgtgaattctgttagtgttgactaaagaatctggtagttgcttaattgggcaattaaacaatttatggctctattttgtaaaacaaactactggtaattatttttaatacctattttcattctgattactctttttttaagttaaagactatcagttaattaagattgagtttttatgatggttaaaaataattctctattggtttttcaatatatttttctgtgtgttctcagattatatatttccctcaatttagagtttgctaagtgaaataaactggttcactagtagagaaagaattacgtcgcttaatacctaatatcatagttgtacaatatgaaaaaaaagaataaaaagtagcagtaaaattatatactgaaaacaccaaaaatttagatgccttaatagtatatacgtgaaatactcagctgtccctttaaaaataattccttggactgcctggtggttaaaatacgattcctcatatccaaggctacttttgaagatccctctgccaaaaatatagctcacttatctaaaggtgagagctgcatagatccagtaatgtacataaagcctgaatgatgagcctatgtccctgcctaacgctggtgtctcactcatctcttttacctaaattgtcctgaactttgttaagtgttctggacaaggccaagcttttctttattaaaacctcagcatgtctccctgatctgaactatttgctttctcttcaagataagttgtattttaccatggaaaaatacagtatctaacattaccattcacgttaaatgaagtttcctcataacatttatctttagttttatgaagtcatcgtgaccaatgttacagtaatttctgttagctgattgtggtaaacaatgtttaatgtgaaaagaaattaaaactttcttcatctgttgtaaaaaaaaaa

SEQ ID NO: 155 - DNA, 1993 bp, HOMO SAPIENS
ggctggggaggagcaggaacagtcaggactggaatctagctttgctccaaagccagctcttaattaccaacatggggatgggggtggcgtgttcctggccctcattttccgggagaggggtaactcccccgattttggcccccacatccctgagaaccttggggtctggctgtaggaggtaggggagctctgaggggtccgcgctggctagttcctgagagagcgttaaaagtagattctcctttcgctccaactttctcggtgtctcaaacactctcctgccttctgggcccattgggcacaccgccacccaatccggggacccccggagactcgccagctctccaggatgggaatttcgtgatgttccctgcctgagcttcggggagggcgggggagtgctgtaaggggctatcgcgcaagtgcagaccctctgcttctgccgcaaacggcgggcctcacctggacccggggactcttcaacgaggggcgctagcctggcccgactgggcgagtccccgcgtccctgcccgttccgtcgctcagttccacgacacgctcccctgccgccccgcctgttcgcgggtgggtgggcgcttccctcggctccccgtgacactttgcagacgctccccggcgccgggcatgggcgccgccgccgtcggtccccgagccggattccgcgagcggtgcccctgaggccctcggctgctggggtccgtaggaagccgcgccatgaatgaccggagcagtcggaggcggacaatgaaggacgatgagaccttcgagatctccattcccttcgatgaggcaccccacctagacccacagatcttttacagtctgagcccctctcggagaaacttcgaggagcctccggaggctgcgtcctccgccctggctctgatgaacagcgtcaagacccagctgcacatggctctggagaggaactcctggctgcagaagcgcatcgaggacctggaggaagagagggacttcctgcggtgccagctggacaaattcatctcttctgctcggatggaggcagaggaccactgccggatgaagcctgggcccaggcggatggagggggacagccgtggtggggctgggggcgaggcctcggaccctgagtcagcagcctcctccctcagcggagcgtccgaagaaggcagcgccagtgagaggaggcggcagaagcagaagggaggtgctagtcggaggcgctttgggaagcccaaggcccgggagaggcagcgagtgaaggacgccgacggggtcctctgccggtacaagaagatcctgggcaccttccagaagctcaagagcatgtcgcgggccttcgagcaccaccgcgtggacaggaacaccgtggcgctgaccacgcccatcgccgagctgctcattgtggcccccgagaagctggccgaggtgggcgagttcgacccctccaaggagcgcctgctcgagtactcccgccgctgctttctggccctggacgacgagacgctcaagaaggtgcaggcgctcaagaagagcaagctgctgctgcccatcacctaccgcttcaagcggtgatcgcaccacgcctccgcgcctccacccgggccttcctcccccgtggaccccggtggatgacctgcccctctccccgccgcgcccctgcccctcctcctcgctccctgggttgggggctcccttagccgggcccccaagcgcgacggccccggaccggccgcggccccttcccgaacgccggcacccccttccgcttgggctgcccagccctgtcctcgccgggccccttcctcctggaaaaccaggcaggcgggtgcccccccctcgagtgggggactgtacagaccccgtctccgccctggccccgcggaggagctgcccacctgattcccggacagacctccccaactccgcgtgagacagagaattattcagataatttaaattaaaaaacgacgtgaaaatttggaataaa

SEQ ID NO: 156 - DNA, 2808 bp, HOMO SAPIENS
cggaggagtcttaccctaatgtaagatggtggcccgtctggctgtggaacccaccgaaagctgagagtctctctctcagccgtaaaggtcggactcgctgaagcaatcaggcccggttctgaagagttttttccccgacgctcgttcggtggtttcttgtgaggacgcggcagcccgtggagtcggctgagggaaaagcgaggcaaggcaggcgggtcgtcaaagtcctacattttagctttcagtgctgaacttccttctcccttaaattattataaacttttgctgctgtttaataaacgtgaagatgtctcgcagtcctgatgcgaaggaagaccctgtggagtgccctctttgcatggagcccttggagatagatgatatcaactttttcccttgcacctgtggctaccagatttgccgattttgttggcatcgaattcgcactgatgaaaatgggctttgtcctgcatgtagaaagccatatccagaagacccagcagtttataaaccactctcccaggaagagctgcaaaggataaagaatgagaaaaaacagaaacaaaatgagagaaaacagaaaatatcagaaaatcgcaaacatttggctagtgtacgtgtcgtacaaaaaaacctcgtctttgttgtaggtttatctcagcgcctagcagacccagaggttttaaaacgaccagaatattttgggaagtttggtaaaatacataaagttgtcatcaataatagcacatcatatgcaggctcacagggtccaagtgccagtgcttatgtaacctatatccggtcagaagacgctctcagagccatacagtgtgtcaacaatgtggtagtagatggcagaacacttaaggcatctctaggtacaacaaaatactgcagttacttcttaaagaatatgcagtgtccaaaacctgactgcatgtatcttcatgaattgggggatgaggcggccagcttcacaaaagaggaaatgcaggcgggtaaacaccaagaatatgaacagaagctacttcaagaattatataaattaaatcccaattttcttcagctatctacgggttcagttgataaaaataagaacaaagtgacaccactgcagagccccattgacaaaccttcagattctctcagtatagggaacggtgataattcccagcagatatctaacagtgatacgccttcaccaccacctggtttgtcaaaatccaatccagtcatccccatcagttcatccaatcacagtgcacggtccccttttgaaggggcagtaacagagtcacagtcgttattctcagacaattttcgccatcccaaccctatcccaagtgggcttcctcctttccccagctccccacagacatccagtgactggcctacagcaccagaaccacagagcctcttcacatcagaaacaatcccagtatcatcctctacagactggcaagcagcttttggctttggttcttctaaacaaccagaggatgacttgggttttgatcccttcgatgtcactcgaaaagccttagcagacctgattgagaaggaactgtccgttcaagaccaaccttccctttcgcccacatctcttcagaactcctcttcacacactacaaccgccaaaggtccaggctctggattcctgcatcctgctgcagctacaaatgccaattctctcaatagtaccttttcagtcttgccccagaggttccctcaatttcagcagcaccgagcggtttataattcattcagttttccaggccaggcagcccgctatccttggatggcctttccacgcaatagcatcatgcacttgaaccacacagcaaaccccacctcaaatagtaatttcttggacttgaatctcccgccacagcacaacacaggtctgggagggatccctgtagcaggggaagaagaggtgaaggtttcgaccatgccactgtcaacctcttcccattcattacaacaaggacagcagcctacaagtctccacactactgtggcctgacaacagaactgagaggagaggattagactctggggtgcttgcatgggcaactggatttttgcatgattcctttatgattttgcttttaatgtatacacccagaagagccaatataaacgttcctcatgcctacagctagcgtgttacctcatagttgttgaagtatttcttcattaggcctttaacataatttattagtgtaataattttggcattgtttctcatgagtgatactatttctaactcataaaaataaacttgtagtactaagatcccaggtgagattagctagaattgttgttattttggctctattattgaaaaattatacaaaggtaatggtagtatcttgttttctggtttgtgaaaaaataatatcctaatctcctgaaaaatttgcaaattaacaagataatgtctattgcattctttgaatacttgagaagaaagaatacatataaaacaaaattggtggtgtcatttaatgctcagaaggatattgttggcgattgtttttagttgtctagatttatatcctataatatgcattacatgtgtagaaactgttttgttctctctcttttgcacttttgcactttctttttgaatggttgttaattatgcatagatggttaaaagataattattgtagcctaaatgcaatataatctcttttctaatgcactgcctagtataccaggaaatgcctcaaaaacagaacttcagtttatagttgacttatctgaaacttgaatacggagtaaacattgtatgtgaaaagc

SEQ ID NO: 157 - DNA, 2974 bp, HOMO SAPIENS
tgcccaggaggtaggctgcatccgcccctctgtctgtctgtcaacatcgccctaggaccgagctgctgggtgccccggaagaagggcaggcaggaaggggaggggcagtgaggttggctccccccaccacctcaccctggtgcccccagcccagcccaagacaccagggcatttgctgacatctgaggcccttcccaggaagacatggcctcgttcttggtgtggccactgaggacggcgctgagagggggaaagtcatgggcagggcctggtgtgggatgtggaggagacggcgcccggggaggaggagcgctgtgcccaggtggcctcacttgtcatctcaaagtggcgtcgaaccccctgacaggtggacgggaacccccggctggccctccagagaccaggaggcccctggctcaatgatgccacctgcagctgcccaaccctccgcccatggtgcccttgttccacctgccaccgctcatgaacctgtggatcacccagctctgcactggcttgcctgctgctgctgtctcagtttacctgggcagttgcccctggctatccggctgggatgggacttggacttagaagcaggcccctcctctggaaagctgtgtcctcgggccaggaggtggcagcctctaccttcctgagacagggacccttttctgtccatcagaggacagctgtatgaagacacagagagaaggcagccatctgtaagccaggaagagagccctcaccaagactggaatcagcagcaccttgatattggacttccagcctccagaactgcaagaaataagcacctgctgtttacatgcccagcctgcagtgcttccttatggcagattggagctaactgagacagctcccagcactcattcattcattcattcattcactcacctcatgtctactaaacagctctgggctggctctgggaagcagtgagtcacacacactgcccccagcaacgtgtgaaatatgtttagagacagtgggctacagcggaaagggtagatgccctgagaaccccagcggtgctggtcagaagcacaggccttgttgggctgaggctggcatggggtgaacctggggagcctcgggggcagaggtgatagatgtggggtgtttcaaggcagtgagacaaagaagggagatgggtggtgccccccaatgccaggcttcaccagcctcccaacacacgagtgttcacccgcctggatgagacacctctgtggacttgggagtgaaggcagtgaatttgggcaatgctggaggccgtgcaggtgggaggtgggacaggggcaagaggccggggcccaggcaggagctgacagcccaccagtggtgctcccctgagaagcaacctcagtgggtggcttggggtctgctgggctgtccccacactgacaccctggctgcagggcccccctgtgtccccagtgaggggtctcgggagctgtgtgtcctactcagggccatccctgcagcccatgctctctgggtgaccagttgccagcagtgtcccccctgccttgggcggaggctgaggaccccagggtgggagggaaggtgcggtgggggctcagccaatgctgcccagcctgagggtccctcacatgtgggccgcacccctgcgtcagccggagtgatctctgcttagggtggtttgaggtgagttctgatatctcaaacaccagcatcagggccagggcagacaaaataagagtgagctggtcaggggtgtcccagttgggagctcgctcacagtctttaaggaggcagggcacagcccagtgggggtggccacgaggccccgggcctgtggctgagatggcaactggcaccggcagtgattggaacagtccagcccatggagccctgtggccttggccggtggctcacggtgccacgggagctggagcaatgggtggcctcccttgcctggtgcctgagtgaaggaggactgggtgcccctgaggaaggaccttgccatactcctacaaatttacattattcttctttccccagtctcccctcagggacctgcagccatttgctggggtggctagtggaaagggggatcatcagactcagggggattactggactctaactctaacctgacacccactcctggggacacaaacacccatcggatctaatagtcagaggaggggcgtatggaggtcagtgggctcacggagttctagctcaggtccaaccctcggtgggtgcagaggtcacttccctagcctcagatgggtgagtaaacagacgtatgtggcagccagcagagcccccacatttgttccctgacctgagggtgggggctactatgctgggaaaggccaggtggaagccattggggtgaactctgcctaggaaaattgtcagtcaaaagcaacctgcagccctggagggactgcaaaggtcagtgccgccatcgaggacttggaagatgcagggtggtgacccccactgcagcctcgttccactcgtctaattggcttgtgtggaagacaggggggtcccggagaaagaaggacagtgaatcctggtaaacttaaccaggactccaattgcaactgctgttccagatatgactactgatcactggggcaaatcaaagcatccccggacacctggtctacagccattgatctggtgaaagctttaatttttaatatagattttattttttagagcagtttcatgtttacagagaaattgagcatatttgagagtcctcatatagcatctctccctacacacagtttcccttattattcatatcttgaattactgtgatacatctttgcaattgatgaaccaatattgacctagtcattgatcaggttacatgagggttcactcttcttgttgtacatgctgtgagttcgggcaaatgtgtaatggcatatctccactattacagtgtcacacagaattattttactgccct

SEQ ID NO: 158 - DNA, 3674 bp, HOMO SAPIENS
gggcctactctgccgccgccgccgcccgcccgctccagccgccgccgccgccgccaccgccctccaggctccgggacccggcccgcgccaccgcccccgtgcgcgccccgccgccgccgccttcgccttcgccttttgtttcctccgctccggcgcccccgccccggctcgcgctttgcaggggacgcagcgcgcgcccccagcgggcccgggaaaagccgcggcgcgcgcgcgcgcctgcgcggcggacccctccttctcctccccgcgtgcgcgtgcccttcttggctgcgcgccggcgccgcctggcgggcgggaggggaggtggcaggcgcgtttgcaggaggggcgcacctcttcgctcgcgcacccccccggaaggtagaccgggaaggggaggcgggcgggcggagaggagagagtggcgcgcagtccagcgagggcgggggttggctatgtggggggtggtgcaccccgcagtctagacagtctgatccgggctgggggcgtgtacactcggcgcacctgcgagactacagagcctcgggccggcacgtgtggggagtgtggacacgtctgctgcgccccgcttctcgctgctgaggggaagggagggggcgggcaggtgcagcggccgggctagtgggagggggcggcggccatggagcgggtgaacgacgcttcgtgcggcccgtctggctgctacacataccaggtgagcagacacagcacggagatgctgcacaacctgaaccagcagcgcaaaaacggcgggcgcttctgcgacgtgctcttgcgggtaggcgacgagagcttcccagcgcaccgcgccgtgctggccgcctgcagcgagtactttgagtcggtgttcagcgcccagttgggcgacggcggagctgcggacgggggtccggctgatgtagggggcgcgacggcagcaccaggcggcggggccgggggcagccgggagctggagatgcacactatcagctccaaggtatttggggacattctggacttcgcctacacttcccgcatcgtggtgcgcttggagagctttcccgaactcatgacggccgccaagttcctgctgatgaggtcggttatcgagatctgccaggaagtcatcaaacagtccaacgtacagatcctggtaccccctgcccgcgccgatataatgctctttcgcccccctgggacctcggacttgggcttccctttggacatgaccaacggggcagccttggcagccaacagcaatggcatcgccggcagcatgcagccagaggaggaggcagctcgggcggctggtgcagccattgcaggccaagcctctttgcctgtgttacctggggtggaccgcttgcccatggtggctggacccctatccccccaactgctgacttccccattccccagtgtggcatccagtgcccctcccctgactggcaagcgaggccggggccgcccaaggaaggccaacctgctggactcaatgtttgggtccccagggggcctgagggaggcaggcatccttccatgcggtctatgtggtaaggtgttcactgatgccaaccggctccggcagcacgaggcccagcacggtgtcaccagcctccagctgggctacatcgaccttcctcctccgaggctgggtgagaatgggctacccatctctgaagaccccgacggcccccgaaagaggagccggaccaggaagcaggtggcttgtgagatctgcggcaagatcttccgtgatgtgtatcatcttaaccggcacaagctgtcccactctggggagaagccctactcctgccctgtgtgtgggttgcggttcaagagaaaagaccgcatgtcctaccatgtgcggtcccatgatgggtccgtgggcaagccttacatctgccagagctgtgggaaaggcttctccaggcctgatcacttgaacggacatatcaagcaggtgcacacttctgagcggcctcacaagtgtcagacctgcaatgcttcttttgccacccgagaccgtctgcgctcccacctggcctgtcatgaagacaaggtgccctgccaggtgtgtgggaagtacttgcgggcagcatacatggcagaccacctgaagaagcacagcgaggggcccagcaacttctgcagtatctgtaaccgagaaggccagaaatgctcacatcaggatccgattgagagctctgactcctatggtgacctctcagatgccagcgacctgaagacgccagagaagcagagtgccaatggctctttctcctgcgacatggcagtccccaaaaacaaaatggagtctgatggggagaagaagtacccatgccctgaatgtgggagcttcttccgctctaagtcctacttgaacaaacacatccagaaggtgcatgtccgggctctcgggggccccctgggggacctgggccctgcccttggctcacctttctctcctcagcagaacatgtctctcctcgagtcctttgggtttcagattgttcagtcggcatttgcgtcatctttagtagatcctgaggttgaccagcagcccatggggcctgaagggaaatgaggcagctgctgtgtccccacggaaacaaccatctggggactgctgggaaatgctgtgaatgcggagggaagtgatgtttgggttctgtagctgagagatttttattcatttttaactgccccccaaccccactccaactccttctccaccacccattctcccaatggtctttagaaatagattttcatctgatattctgcagaaatatcaatgagacttggtatgggacaggggcagaaaacactacataggcctccaaggcaaaaccagtcccagtttctttaatgggaagaagctggaattcctggtgctcaattcttagtgaccccaatcctatacccaaatctatgatattctgggacctcagtgattttggtcccctcccacttctctagttcgtcatcctcccttcccatatccttcaaaagaaccacactagggtctccacctacttatacaatgcggatgcccaactgtttttaaggaagccagaagcatcccatggaccatggggtgagtgtcctccaagagccccctgagctcagccctctgcctggagggctccagacctttctgagccctgcttggaggcgagcattttcactgctaggacaagctcagctgttgaggacacccccaccccaaatttcagttcttacgtgattttaaccattcaacatgctgttgggttttaattctctaattattattattattgttattattttttaggaccagttgtagtgaattgctactgaaagctatcccaggtgatacagagctctttgtaaaccgcagtcacacattagggttagtattaaactttgtttagatgtaccataattaacttggctagttgattgtttgaagtctatggaagaaatagttttatgcaaaattttaaaaaatgccagtctggtcagggaagtagggggtttcaatgctgttgggaaccaggaaggtgggacagccggcaggtagggacattgtgtacctcagttgtgtcacatgtgagcaagcccaggttgaccttgtgatgtgaattgatctgatcagactgtattaaaaatgttagtacattactcta

SEQ ID NO: 159 - DNA, 7833 bp, HOMO SAPIENS
atggagccgcacgtgctcggcgcggtcctgtactggctgctgctgccctgcgcgctgctggctgcctgcctgctccgcttcagcggactctcgctggtctacctgctcttcctgctgctgctgccctggttccccggccccacccgatgcggcctccaaggtcacacaggccgcctcctgcgggcattgctgggcctcagcctgctcttcctggtggcccatctcgccctccagatctgcctgcatattgtgccccgcctggaccagctcctgggacccagctgcagccgctgggagaccctctcgcgacacataggggtcacaaggctggacctgaaggacatccccaacgccatccggctggtggcccctgacctgggcatcttggtggtctcctctgtctgcctcggcatctgcgggcgccttgcaaggaacacccggcagagcccacatccacgggagctggatgatgatgagagggatgtggatgccagcccgacggcagggctgcaggaagcagcaacgctggcccctacacggaggtcacggctggccgctcgtttccgagtcacggcccactggctgctggtggcggctgggcgggtcctggccgtaacactgcttgcactggcaggcatcgcccacccctcggccctctccagtgtctacctgctgctcttcctggccctctgcacctggtgggcctgccactttcccatcagcactcggggcttcagcagactctgcgtcgcggtggggtgcttcggcgccggccatctcatctgcctctactgctaccagatgcccttggcacaggctctgctcccgcctgccggcatctgggctagggtgctgggtctcaaggacttcgtgggtcccaccaactgctccagcccccacgcgctggtcctcaacaccggcctggactggcctgtgtatgccagccccggcgtcctcctgctgctgtgctacgccacggcctctctgcgcaagctccgcgcgtaccgcccctccggccagaggaaggaggcggcaaaggggtatgaggctcgggagctggagctagcagagctggaccagtggccccaggaacgggagtctgaccagcacgtggtgcccacagcacccgacaccgaggctgataactgcatcgtgcacgagctgaccggccagagctccgtcctgcggcggcctgtgcggcccaagcgggctgagcccagggaggcgtctccgctccacagcctgggccacctcatcatggaccagagctatgtgtgcgcgctcattgccatgatggtatggagcatcacctaccacagctggctgaccttcgtactgctgctctgggcctgcctcatctggacggtgcgcagccgccaccaactggccatgctgtgctcgccctgcatcctgctgtatgggatgacgctgtgctgcctacgctacgtgtgggccatggacctgcgccctgagctgcccaccaccctgggccccgtcagcctgcgccagctggggctggagcacacccgctacccctgtctggaccttggtgccatgttgctctacaccctgaccttctggctcctgctgcgccagtttgtgaaagagaagctgctgaagtgggcagagtctccagctgcgctgacggaggtcaccgtggcagacacagagcccacgcggacgcagacgctgttgcagagcctgggggagctggtgaagggcgtgtacgccaagtactggatctatgtgtgtgctggcatgttcatcgtggtcagcttcgccggccgcctcgtggtctacaagattgtctacatgttcctcttcctgctctgcctcaccctcttccaggtctactacagcctgtggcggaagctgctcaaggccttctggtggctcgtggtggcctacaccatgctggtcctcatcgccgtctacaccttccagttccaggacttccctgcctactggcgcaacctcactggcttcaccgacgagcagctgggggacctgggcctggagcagttcagcgtgtccgagctcttctccagcatcctggtgcccggcttcttcctcctggcctgcatcctgcagctgcactacttccacaggcccttcatgcagctcaccgacatggagcacgtgtccctgcctggcacgcgcctcccgcgctgggctcacaggcaggatgcagtgagtgggaccccactgctgcgggaggagcagcaggagcatcagcagcagcagcaggaggaggaggaggaggaggaggactccagggacgaggggctgggcgtggccactccccaccaggccacgcaggtgcctgaaggggcagccaagtggggcctggtggctgagcggctgctggagctggcagccggcttctcggacgtcctctcacgcgtgcaggtgttcctgcggcggctgctggagcttcacgttttcaagctggtggccctgtacaccgtctgggtggccctgaaggaggtgtcggtgatgaacctgctgctggtggtgctgtgggccttcgccctgccctacccacgcttccggcccatggcctcctgcctgtccaccgtgtggacctgcgtcatcatcgtgtgtaagatgctgtaccagctcaaggttgtcaacccccaggagtattccagcaactgcaccgagcccttccccaacagcaccaacttgctgcccacggagatcagccagtccctgctgtaccgggggcccgtggaccctgccaactggtttggggtgcggaaagggttccccaacctgggctacatccagaaccacctgcaagtgctgctgctgctggtattcgaggccatcgtgtaccggcgccaggagcactaccgccggcagcaccagctggccccgctgcctgcccaggccgtgtttgccagcggcacccgccagcagctggaccaggatctgctcggctgcctcaagtacttcatcaacttcttcttctacaaattcgggctggagatctgcttcctgatggccgtgaacgtgatcgggcagcgcatgaactttctggtgaccctgcacggttgctggctggtggccatcctcacccgcaggcaccgccaggccattgcccgcctctggcccaactactgcctcttcctggcgctgttcctgctgtaccagtacctgctgtgcctggggatgcccccggccctgtgcattgattatccctggcgctggagccgggccgtccccatgaactccgcactcatcaagtggctgtacctgcctgatttcttccgggcccccaactccaccaacctcatcagcgactttctcctgctgctgtgcgcctcccagcagtggcaggtgttctcagctgagcgcacagaggagtggcagcgcatggctggcgtcaacaccgaccgcctggagccgctgcggggggagcccaaccccgtgcccaactttatccactgcaggtcctaccttgacatgctgaaggtggccgtcttccgatacctgttctggctggtgctggtggtggtgtttgtcacgggggccacccgcatcagcatcttcgggctgggctacctgctggcctgcttctacctgctgctcttcggcacggccctgctgcagagggacacacgggcccgcctcgtgctgtgggactgcctcattctgtacaacgtcaccgtcatcatctccaagaacatgctgtcgctcctggcctgcgtcttcgtggagcagatgcagaccggcttctgctgggtcatccagctcttcagccttgtatgcaccgtcaagggctactatgaccccaaggagatgatggacagagaccaggactgcctgctgcctgtggaggaggctggcatcatctgggacagcgtctgcttcttcttcctgctgctgcagcgccgcgtcttccttagccattactacctgcacgtcagggccgacctccaggccaccgccctgctagcctccaggggcttcgccctctacaacgctgccaacctcaagagcattgactttcaccgcaggatagaggagaagtccctggcccagctgaaaagacagatggagcgtatccgtgccaagcaggagaagcacaggcagggccgggtggaccgcagtcgcccccaggacaccctgggccccaaggaccccggcctggagccagggcccgacagtccagggggctcctccccgccacggaggcagtggtggcggccctggctggaccacgccacagtcatccactccggggactacttcctgtttgagtccgacagtgaggaagaggaggaggctgttcctgaagacccgaggccgtcggcacagagtgccttccagctggcgtaccaggcatgggtgaccaacgcccaggcggtgctgaggcggcggcagcaggagcaggagcaggcaaggcaggaacaggcaggacagctacccacaggaggtggtcccagccaggaggtggagccagcagagggccccgaggaggcagcggcaggccggagccatgtggtgcagagggtgctgagcacggcgcagttcctgtggatgctggggcaggcgctagtggatgagctgacacgctggctgcaggagttcacccggcaccacggcaccatgagcgacgtgctgcgggcagagcgctacctcctcacacaggagctcctgcagggcggcgaagtgcacaggggcgtgctggatcagctgtacacaagccaggccgaggccacgctgccaggccccaccgaggcccccaatgccccaagcaccgtgtccagtgggctgggcgcggaggagccactcagcagcatgacagacgacatgggcagccccctgagcaccggctaccacacgcgcagtggcagtgaggaggcagtcaccgaccccggggagcgtgaggctggtgcctctctgtaccagggactgatgcggacggccagcgagctgctcctggacaggcgcctgcgcatcccagagctggaggaggcagagctgtttgcggaggggcagggccgggcgctgcggctgctgcgggccgtgtaccagtgtgtggccgcccactcggagctgctctgctacttcatcatcatcctcaaccacatggtcacggcctccgccggctcgctggtgctgcccgtgctcgtcttcctgtgggccatgctgtcgatcccgaggcccagcaagcgcttctggatgacggccatcgtcttcaccgagatcgcggtggtcgtcaagtacctgttccagtttgggttcttcccctggaacagccacgtggtgctgcggcgctacgagaacaagccctacttcccgccccgcatcctgggcctggagaagactgacggctacatcaagtacgacctggtgcagctcatggcccttttcttccaccgctcccagctgctgtgctatggcctctgggaccatgaggaggactcaccatccaaggagcatgacaagagcggcgaggaggagcagggagccgaggaggggccaggggtgcctgcggccaccaccgaagaccacattcaggtggaagccagggtcggacccacggacgggaccccagaaccccaagtggagctcaggccccgtgatacgaggcgcatcagtctacgttttagaagaaggaagaaggagggcccagcacggaaaggagcggcagccatcgaagctgaggacagggaggaagaagagggggaggaagagaaagaggcccccacggggagagagaagaggccaagccgctctggaggaagagtaagggcggccgggcggcggctgcagggcttctgcctgtccctggcccagggcacatatcggccgctacggcgcttcttccacgacatcctgcacaccaagtaccgcgcagccaccgacgtctatgccctcatgttcctggctgatgttgtcgacttcatcatcatcatttttggcttctgggcctttgggaagcactcggcggccacagacatcacgtcctccctatcagacgaccaggtacccgaggctttcctggtcatgctgctgatccagttcagtaccatggtggttgaccgcgccctctacctgcgcaagaccgtgctgggcaagctggccttccaggtggcgctggtgctggccatccacctatggatgttcttcatcctgcccgccgtcactgagaggatgttcaaccagaatgtggtggcccagctctggtacttcgtgaagtgcatctacttcgccctgtccgcctaccagatccgctgcggctaccccacccgcatcctcggcaacttcctcaccaagaagtacaatcatctcaacctcttcctcttccaggggttccggctggtgccgttcctggtggagctgcgggcagtgatggactgggtgtggacggacaccacgctgtccctgtccagctggatgtgtgtggaggacatctatgccaacatcttcatcatcaaatgcagccgagagacagagaagaaatacccgcagcccaaagggcagaagaagaagaagatcgtcaagtacggcatgggtggcctcatcatcctcttcctcatcgccatcatctggttcccactgctcttcatgtcgctggtgcgctccgtggttggggttgtcaaccagcccatcgatgtcaccgtcaccctgaagctgggcggctatgagccgctgttcaccatgagcgcccagcagccgtccatcatccccttcacggcccaggcctatgaggagctgtcccggcagtttgacccccagccgctggccatgcagttcatcagccagtacagccctgaggacatcgtcacggcgcagattgagggcagctccggggcgctgtggcgcatcagtccccccagccgtgcccagatgaagcgggagctctacaacggcacggccgacatcaccctgcgcttcacctggaacttccagagggacctggcgaagggaggcactgtggagtatgccaacgagaagcacatgctggccctggcccccaacagcactgcacggcggcagctggccagcctgctcgagggcacctcggaccagtctgtggtcatccctaatctcttccccaagtacatccgtgcccccaacgggcccgaagccaaccctgtgaagcagctgcagcccaatgaggaggccgactacctcggcgtgcgtatccagctgcggagggagcagggtgcgggggccaccggcttcctcgaatggtgggtcatcgagctgcaggagtgccggaccgactgcaacctgctgcccatggtcattttcagtgacaaggtcagcccaccgagcctcggcttcctggctggctacggcatcatggggctgtacgtgtccatcgtgctggtcatcggcaagttcgtgcgcggattcttcagcgagatctcgcactccattatgttcgaggagctgccgtgcgtggaccgcatcctcaagctctgccaggacatcttcctggtgcgggagactcgggagctggagctggaggaggagttgtacgccaagctcatcttcctctaccgctcaccggagaccatgatcaagtggactcgtgagaaggagtaggagctgctgctggcgcccgagagggaaggagccggcctgctgggcagcgtggccacaaggggcggcactcctcaggccgggggagccactgccccgtccaaggccgccagctgtgatgcatcctcccggcctgcctgagccctgatgctgctgtcagagaaggacactgcgtccccacggcctgcgtggcgctgccgtcccccacgtgtactgtagagttttttttttaattaaaaaatgttttatttatacaaatggacaatcaga

SEQ ID NO: 160 - DNA, 3655 bp, HOMO SAPIENS
cttccggacaggtcaggccaaggtctcagccacgtgactgtgttccggctcggtaaagatggcggcgcccagggcggtagcgtgaaacttggtggaagacgctgaccagtcgtgttggaatcaaaacagcggggaccctgcgccatgtcgcgactgatcgtgaagaatctcccgaatgggatgaaggaggagcgtttcaggcagctgtttgccgccttcggcacgctgacagactgcagcctgaagttcaccaaagatggcaagttccgcaagtttggttttattggcttcaagtccgaggaagaggcccagaaggcacagaagcatttcaacaagagcttcatcgacacatcccggatcacagtggagttctgcaagtcattcggggacccggccaaacccagagcctggagcaaacatgcccagaaaccaagccagcccaagcagcctccaaaagactctactactccagaaattaagaaagatgagaagaagaaaaaggtggcaggtcaactggagaagctgaaggaggatacagagttccaggagtttctgtcagttcatcagaggcgggcgcaggcagccacttgggcgaatgatggcctggatgctgagccctcgaaagggaagagcaagccggccagtgactacctgaacttcgactccgattctgggcaggagagtgaggaggagggagccggggaggacctggaagaagaggcaagcctcgaaccaaaggcagctgtgcagaaggagctgtcggacatggattacctgaaatccaagatggtgaaggctgggtcgtcctcttcctcggaggaagaggaaagtgaagatgaagccgtgcactgtgatgaagggagtgaggccgaggaagaggattcctccgccaccccagtcctgcaggaaagagacagcaagggtgcaggccaagagcaagggatgccagctgggaaaaagagaccaccggaggccagagccgagacagagaaaccagcaaaccagaaggaacccaccacctgccacaccgtgaagctgcggggagccccgttcaatgtcacagagaaaaatgttatggaattcctggcacccctgaaaccagtggccattcgaattgtgagaaacgctcatgggaataaaacaggatacatctttgtggatttcagcaatgaagaggaagtgaagcaagctctgaaatgcaaccgggagtacatgggtgggcgctacatcgaggtgttcagggaaaagaacgtccccaccaccaagggtgcaccaaagaataccaccaaatcctggcaaggccggatactcggggagaacgaagaggaggaggacctggccgaatccggaaggctctttgtacggaacctgccctacaccagcaccgaggaggatctggagaagctcttctccaaatatggtcccctgtctgagctccactaccccatcgacagcctgaccaagaaacccaagggttttgcattcatcaccttcatgttccctgagcacgctgtgaaggcctactcggaggtggacgggcaggtattccagggcaggatgctccacgtgttaccatctaccatcaagaaggaagccagcgaggatgccagtgccctgggatcgtcgtcctacaagaagaagaaggaggcccaggacaaagccaacagtgccagctctcacaactggaacacactattcatggggccgaatgccgtggccgatgccatcgcacagaagtacaacgccaccaagagtcaagtgtttgaccacgagaccaagggcagcgtggccgtgcgcgtggctctgggggaaacccagctcgtccaggaagtgcggcgttttctcatagacaacggggtcagcctggattccttcagccaggctgcagcagagcgaagcaagactgtgattctggtcaagaacctcccggcaggcaccctggcggcccagctgcaggagaccttcggccattttggcagcctgggccgcgtgctgctgccagagggcggaatcactgccatcgtggagttcctggagcccctggaggcccgcaaggccttcaggcatctggcctattccaagttccatcatgtccccctctatctggagtgggctccagttggcgtcttctccagcacagccccacagaagaaaaagctccaagacacaccttcagaacccatggaaaaggacccagcagagccagaaacagtgcctgatggcgaaaccccagaagatgaaaatccaacagaggaaggagcagacaactcttcagcaaagatggaagaggaggaggaggaagaggaagaagaagaagagagcctcccaggatgtactctgtttattaagaatctcaattttgacacaacagaagagaagctgaaggaagtgttttcaaaagtggggacagtgaagagctgctccatctccaagaagaagaacaaagcaggagtgctcctttccatggggtttggatttgtggaatacaggaagccggagcaagcccagaaagctctcaagcagctccagggtcacgtcgtggacggccacaagctggaagtgaggatctcggaacgagccactaagccagccgtgacattggctcggaagaaacaagttcccagaaagcagaccacctccaagatcctggtgcggaacatccccttccaggcccacagccgggagatccgagagctcttcagcacctttggggagttgaagacggtccgcctgccaaagaagatgactgggacaggcacacacagaggcttcggctttgtggacttcctcaccaagcaggatgcgaagagagccttcaacgccctgtgtcacagcacccacttgtacgggcggaggctggtgctggagtgggccgactccgaggtgaccctgcaggccctgcggcggaagacggccgctcactttcacgagcccccgaagaaaaagcggtctgtggtgttggacgagatcctggagcagctggaaggcagtgacagcgacagcgaggagcagacccttcagctgtgagctggcaccgagaggggctgctgagctagaattcccacctatgtctttccaagggactgttcacggcttgggacttggtctctgtcctgccccatcctcgtcacttgggaccacgagccctggttcagtcacccagggaagcctcccagcggctcatgaagcatcgagctccaagcccagatgccaagctccctggctgagctgaatgatgtcactcatggtggacgcgttctgctcacgggcccagagccctgtgaaatgcatcaaggtcctctccgctggccagcagcatccccaggcttctctcaggcgcccgtgttcacattttctccagcctgagacgcagcctcccgcctggaagggcctgtgccagcaccaggcagagggcaagacggagagggcagagcaagaactgcactgcatctcactgcagtctgaatctagacatcgccattccccgaggtgcgacctcagactaatgacatcctggctgagcctctgtttttctctctaggaaatgggggtgataattgtgcctacctcagatagacagtgccagaattaagtgagtcaagccaagtaaagcccagagaagattctcatcagcaaaaaaaaaaaaaaaaaaaaa

SEQ ID NO: 161 - DNA, 8774 bp, HOMO SAPIENS
gaagagtcgccggtggccgcggcagacggaagccgaacgagttcctcggcggctgcaggatgggggactccaaagtgaaagtggcggtgcggatacgacccatgaaccggcgagagactgacttgcataccaaatgtgtggtggatgtggatgcaaacaaggttattcttaatcctgtaaatacgaatctttccaaaggagatgcccggggccagccgaaggtgtttgcttatgatcattgtttctggtctatggatgaatctgtcaaagaaaagtatgcaggtcaagatattgttttcaagtgccttggagagaatatcctgcagaatgcttttgatggctacaatgcatgtatctttgcctatggacagactggctctggaaaatcttataccatgatgggcacagctgaccaacctggattaatcccaagactttgcagtggactctttgaacgaactcagaaagaggaaaatgaagaacagagttttaaagtagaagtgtcctacatggaaatttataatgaaaaagttcgagaccttcttgatcccaaaggaagccgtcagacgttgaaagtcagagagcatagtgtgttgggaccttatgtcgacggactttctaaactggctgtcacaagctacaaggatattgagtcgttgatgtctgagggtaacaaatctcgcacagttgctgcaaccaacatgaacgaggagagtagccgatcccatgcagttttcaaaatcaccctcacacatactctctacgatgtgaagtctgggacatctggagagaaagtgggcaaactcagcctggtggatttagctggcagtgaacgagcaacgaagacaggcgctgcaggggacaggctgaaggaagggagcaacattaacaagtccctcacaaccctcggtctggttatctcagctcttgcagatcagagtgctggcaaaaacaagaataaatttgttccatatcgtgactcagttctcacttggctgctcaaagacagcctcgggggtaacagcaagaccgccatggtggctactgtgagtcctgcagctgataactatgatgaaaccctctcaactctgcggtatgcagatcgagccaagcacattgtaaaccacgctgtggtgaatgaggaccctaatgcccgaattatccgggatctccgggaagaagttgagaaactccgggagcagctgaccaaagcagaggcaatgaaatctccagagctaaaggaccggctggaagaatctgagaagctaatccaggaaatgactgtgacctgggaggagaaattaaggaaaacggaggagattgcacaggaacgacagaaacagcttgagagtcttggaatatctcttcagtcttcgggaatcaaagttggggatgataaatgcttccttgtgaatctgaatgctgacccagctctgaatgagcttctggtgtactatttaaaggaacatacattgatagggtcagcaaattcccaagatatccaactgtgcggcatgggaattcttcctgaacactgtattatagacatcacgtcagaaggccaggttatgctgactcctcagaagaacaccagaacatttgtaaatgggtcatctgtctccagtccaatacagctacaccatggggacaggatattatggggaaacaatcatttcttcagactcaatttgcctaaaaagaaaaagaaagcagaacgagaggatgaggaccaggatccctccatgaagaacgagaatagttctgagcagctggatgtagacggagactcctccagcgaggtgtccagtgaagttaactttaattacgaatacgcacagatggaggtcaccatgaaggccctgggcagcaatgatccgatgcagtccatattaaacagcttagaacaacagcatgaagaagaaaaacgatctgcactggagcgccagaggcttatgtatgagcacgaattggagcagctccggagaaggctgtctcctgagaagcagaactgccggagcatggacaggttttctttccactcgcccagcgctcagcaacgcttaagacagtgggctgaggagagagaagcaacgttgaataacagcctgatgaggctgagggaacaaattgttaaggccaatctattggtgagagaagctaattacattgctgaggagctggataaaagaacagaatacaaagttaccctacagattccagcctccagcctggatgccaacaggaagcgaggctctcttcttagtgagcctgcaatccaggtgagaagaaaaggaaaaggaaagcagatttggtctttggaaaaactggacaacaggctgttggatatgagagacctttatcaggagtggaaagagtgtgaagaagataacccagtaatacgatcatacttcaaacgtgctgatccattctatgatgagcaggaaaatcacagtctcattggggtggccaatgtcttcctcgagtcacttttctatgatgtgaagttacaatacgctgttcccatcatcaaccagaaaggagaggtggcaggtcggctgcacgtggaggtgatgcgactcagtggtgatgttggggagaggatcgcaggaggcgatgaggtggcagaggtctcctttgagaaggagacccaggagaacaaactggtgtgcatggttaaaatcctgcaagctactgggttgccacagcatctgtcccactttgtgttctgcaaatacagcttctgggatcaacaggagccggtgattgtcgctcctgaagtggacacctcctcctcttccgtcagcaaggagccgcactgcatggttgtctttgatcattgcaatgagttttctgttaacatcaccgaagactttatcgagcatctttccgaaggagcattggcaattgaagtatatggacataaaataaacgatccccggaaaaaccccgccctgtgggatttgggaatcatccaagcaaagacacgtagtcttcgggacagatggagtgaagtgaccaggaaattggaattctgggttcaaatcttggaacagaatgagaatggtgaatactgccctgtagaagtgatttctgcaaaggatgtcccaacaggaggaatcttccagctccggcaggggcagtcccggagagttcaagtcgaagtgaagtcagtgcaggaatctgggactttaccactgatggaagaatgtatactgtctgttggcattggatgtgtcaaagttagaccgctcagagcccccagaacacatgagaccttccatgaggaagaggaagacatggacagctaccaggatcgagatttagagagacttcgtagaaaatggctaaatgcattaacaaaacgtcaggagtacttggatcaacaattgcaaaagcttgtcagtaaacgtgataaaacagaggatgatgctgaccgtgaagcgcagcttctggagatgcggttgaccctaactgaggagaggaacgcggtgatggtcccctctgctggcagtggtattccaggggccccagcagaatggaccccagtacctgggatggagacacacattcctgttatattcctggacttaaatgctgatgatttcagctctcaggataatcttgatgacccagaagctggtggatgggatgcgaccttgactggggaagaagaagaggagttctttgaattgcagattgtgaagcagcatgatggggaggtgaaagcagaagcctcctgggactccgcggtgcatggctgccctcagctcagcaggggcacgcccgtggacgagcggttgttcctgatcgtgcgcgtgacggtccagctcagccaccctgctgacatgcaactggtgttacgcaagagaatctgtgtcaatgttcacggccgccagggttttgcacagagtctcctaaaaaagatgtctcatcgaagttctattcctggctgtggagtgacttttgaaattgtctccaatattccagaggatgcccagggagtggaagaacgggaagcattagcaagaatggcagccaatgttgaaaacccagcttctgctgactcggaggcttatattgaaaagtacctcaggagcgtgctggctgtagaaaacctcctgactttagatcgtctgcgccaggaagttgcagtgaaggaacagttaacaggaaaaggaaagttgagcaggaggagtatcagttctccaaatgtgaacagattgtctggaagccgacaagatctcattccatcatacagtctaggcagcaacaagggccggtgggaaagtcagcaggatgtatcccaaaccacagtttccagaggaatagctcctgcccccgccctctctgtttctccccaaaataaccattctccagatccaggactcagtaaccttgcagcatcctacttgaatcctgtcaaatccttcgtgccgcaaatgccaaagctcctcaagtctctctttcccgtccgcgatgagaagaggggcaagcggccgtctcccctcgcacaccagcccgtgccccgcatcatggtgcagtcagccagcccggacatcagggtgaccaggatggaggaggctcagccggagatgggccctgacgtgctggtgcagacgatgggggccccggccttgaagatctgcgacaaacctgccaaagtgccttccccaccgcctgtcatagctgtcacagcggtcaccccggctccggaggcacaggacgggccccccagccccctgagtgaagcctctagcgggtacttctcccacagcgtctccaccgcgaccctgtcggacgccctgggccccggcctggacgctgcggccccgccggggtccatgcccaccgcccctgaggccgagcccgaggcgcccatcagccaccccccaccgcccacggccgtccccgccgaggagccccctggcccccagcagctcgtgagccccggtcgggagcgccccgacctcgaggccccggcgcccggctccccgttccgcgtccggagggtgcgggcctcggagttgcgctccttctcgcgcatgctggctggggaccccggctgctccccgggggccgaggggaatgcgccggccccgggcgccgggggacaggccctggcctctgattccgaggaagctgacgaggtcccggagtggctccgagagggcgagttcgtcaccgtgggcgcccacaaaacgggcgtggtgagatacgtggggcctgccgacttccaagagggcacgtgggtcggcgtggagctcgacctgccctcaggtaagaatgacggttccatcggcgggaagcagtacttcaggtgtaaccctggctacgggctgctggtcaggcccagccgggtccgcagggccacgggccctgtgcggcggcgcagcacaggactccggctgggtgcccccgaggcccgccggagcgccaccctctcgggctccgccaccaacctggcctcgctgacagctgccctggccaaggccgacaggagccacaagaaccctgagaaccggaaatcctgggccagctgagccgctgccttagggcgaacttttctgggggtgcccggccccttttgagccctgccagtgacagccctgaggagccaggagcccggtggccccttccccaggggcagggcgatgaatgctttttgcacgacacagggctggtgacctccctgggcctctggaagctttgtttcttctgtacccgggtaaagtgggggcctcaactgtgcctcctcaggtggatggaaggttctgggtgcccgcaggggctgggggatgctaggactgagaccctgggtggtgcagcgcctggtgatcttgctgtgtgcctgtgcctggggccttatgttgctctttctatcatttccattctggtggccccactaatgtcttaacctaaaccataattgtaaccagtgcctttcctccccactggagggcaagcccccccacccacccaggatgtcctggctcactccgcaagccccccagcctcccaccctggtcccagtttcccgcaaagtgcctctgggggaccccccagcctcccaccctggtcccaggttccacaagtgcctctggagggccctgggctctggcagatggtcctggtgccccagacgggggccgagggcctgagcccccccatccctcctctgccagggtttcttagcggtttctctgtggatgttttggcatctttagacacctggaaagtctcttatgtttgccgtttattcccttcacagaaggcttggaatgtatttatttatatttattttttcaaaatccgaaatcatttgcgagccgcaatcgtcgtctgcctgtgtgggggggcccagggcctgccttgcacgttgcagcctctctggccattgcagagctgctggcctcctgcccaggtggagggtcctggggacggcagaggataaagccccctcctcacatccctctattgcggatccacagtggccttactcttaacttggatgagagcaaaaacctgggagaatgatgtgcttctgtagtcggtgacaaaggaagaggcattgctactttatttggtgcacttttggtttctaggaaggtctttgggtcattttaacttctcggcaactcccagactctcagagtgtggggctggggcctggcggctgggctggtgcagggagtgtgctggttagtctccagaccctcacagcagccacgcccccaggcccaccgtgcatggtgtgggcgggacagccggaagcttccggggtggcctccacctcctggctggggcacttatgctcccagagcctttggtgccaggtttgtgggatgggggttagcgtctatgtgtggaaggccaccaatctagggacaggagtcctgggtcaagattcacacagccacccttggagctggtttctagttctcacatttagtcaacatctagaaagcgctgcggaaggctctggttctctagggacttgaaggcgccaacagagtagtctccatggtgggcctgtcccagccctggctgcgaggacaggttgtctttctctccccagttggcgagggacacgaaggctgcggccgggctggcagagggcccggcccctggggggaggcactcctccagggctctccctgtccttagccgattttgagggaaccctgtggcacctgtccctggatgaagagctgtcacctctgccttgccctttaactcaacccgcttcccagcacagcggctttctttttaaaacctgtttcactgagaagtttgtttttgggtccgctggtgtcactatggcctgggtgagaggccagcactgctgctgccctgaggggaaacgcctgggccgtgtagtggggacgctctgggaatggtggcggacgggcagcgtgggtgggacctggcacttcgtggtggctgagccatccacccagcagcggcctcctgtagcaccatcttgggaaagtcctgggggacgtgtgtgtcgtgctttttaccatcggtttgacttacagtggagtagaacgagccagagttcctgacttgagcaggtggatttgggcccaggccctgttcactcttgcttctcggtgcggactaatgtcagcttgtggctgggaaagagggatgtgcagtgacgtggtcaccaaggcagtgagccccgctgaccccgggccagcacttggcaggcaggaggtgcggtctccagagtggtgggccagggcgggctggcctccgtcttctatcttcttttcttgcctccctgaccagcagactcacctcccaagaacgcctgcccgcccacccgccttaggactcccgatgcgctcctggaaggccccaggagtggcaccttagtgtgggtcggcccgcagatggcacccaaggccgggaagggcagtaactgcacacgcggcgctgtcagagatgggggtgggggatgcttctgggggccctgcctccccattgtgtgcccagaacatccctggccccaccccgccacttccctcgggcccttatgaaggactgaggctccagggtgagaaggctcacttctgccccgggcactgcgtccagcagcagaggggacagggggcaggtgtgtgactgggttcctgggtacccaggcctgaccagagggagcgggagggcagaggtgaggagggggaagatgtttctgggcctaccaaggttcaacaagagaacggagctgggaatgtgactgctggagcctgagaggtggaggagttctgatcccccgttacttcctagcattttctcctcttgccttaaaagttccctgtatgtgaaacgggaagtcctgagagtgtgtgttggtggctgtgcgcacgcacacaagacgggagtcaccctgtgcttcctgcccaagatactgacccattgaacccccaaagcatctttctctccacaaagtccgtggtgccttcctggtgggctgcagacactaatggtgttggggggtcttggaacagcttctctatgtgtggattcgtgtaaatgcgaagagttcacatataaagaagtgactttgattctgtgattatattgatttggtacacagtaaatgggagtttaaaaaatccaaagactctaatgacttgtaaagactctaatgatttgtatcatgtaatgaactaaaccacctgtaattttgtaccgtatgtgtctttccatcaaatgaccaacagcttctcaataaaaccagaccatttctcacctgcaaaaaaaaa

SEQ ID NO: 162 - DNA, 3919 bp, HOMO SAPIENS
gccgccgccaccaccgctgccactgccgccctgccggggccatgttcgctctgggcttgcccttcttggtgctcttggtggcctcggtcgagagccatctgggggttctggggcccaagaacgtctcgcagaaagacgccgagtttgagcgcacctacgtggacgaggtcaacagcgagctggtcaacatctacaccttcaaccatactgtgacccgcaacaggacagagggcgtgcgtgtgtctgtgaacgtcctgaacaagcagaagggggcgccgttgctgtttgtggtccgccagaaggaggctgtggtgtccttccaggtgcccctaatcctgcgagggatgtttcagcgcaagtacctctaccaaaaagtggaacgaaccctgtgtcagccccccaccaagaatgagtcggagattcagttcttctacgtggatgtgtccaccctgtcaccagtcaacaccacataccagctccgggtcagccgcatggacgattttgtgctcaggactggggagcagttcagcttcaataccacagcagcacagccccagtacttcaagtatgagttccctgaaggcgtggactcggtaattgtcaaggtgacctccaacaaggccttcccctgctcagtcatctccattcaggatgtgctgtgtcctgtctatgacctggacaacaacgtagccttcatcggcatgtaccagacgatgaccaagaaggcggccatcaccgtacagcgcaaagacttccccagcaacagcttttatgtggtggtggtggtgaagaccgaagaccaagcctgcgggggctccctgcctttctaccccttcgcagaagatgaaccggtcgatcaagggcaccgccagaaaaccctgtcagtgctggtgtctcaagcagtcacgtctgaggcatacgtcagtgggatgctcttttgcctgggtatatttctctccttttacctgctgaccgtcctcctggcctgctgggagaactggaggcagaagaagaagaccctgctggtggccattgaccgagcctgcccagaaagcggtcaccctcgagtcctggctgattcttttcctggcagttccccttatgagggttacaactatggctcctttgagaatgtttctggatctaccgatggtctggttgacagcgctggcactggggacctctcttacggttaccagggccgctcctttgaacctgtaggtactcggccccgagtggactccatgagctctgtggaggaggatgactacgacacattgaccgacatcgattccgacaagaatgtcattcgcaccaagcaatacctctatgtggctgacctggcacggaaggacaagcgtgttctgcggaaaaagtaccagatctacttctggaacattgccaccattgctgtcttctatgcccttcctgtggtgcagctggtgatcacctaccagacggtggtgaatgtcacagggaatcaggacatctgctactacaacttcctctgcgcccacccactgggcaatctcagcgccttcaacaacatcctcagcaacctggggtacatcctgctggggctgcttttcctgctcatcatcctgcaacgggagatcaaccacaaccgggccctgctgcgcaatgacctctgtgccctggaatgtgggatccccaaacactttgggcttttctacgccatgggcacagccctgatgatggaggggctgctcagtgcttgctatcatgtgtgccccaactataccaatttccagtttgacacatcgttcatgtacatgatcgccggactctgcatgctgaagctctaccagaagcggcacccggacatcaacgccagcgcctacagtgcctacgcctgcctggccattgtcatcttcttctctgtgctgggcgtggtctttggcaaagggaacacggcgttctggatcgtcttctccatcattcacatcatcgccaccctgctcctcagcacgcagctctattacatgggccggtggaaactggactcggggatcttccgccgcatcctccacgtgctctacacagactgcatccggcagtgcagcgggccgctctacgtggaccgcatggtgctgctggtcatgggcaacgtcatcaactggtcgctggctgcctatgggcttatcatgcgccccaatgatttcgcttcctacttgttggccattggcatctgcaacctgctcctttacttcgccttctacatcatcatgaagctccggagtggggagaggatcaagctcatccccctgctctgcatcgtttgcacctccgtggtctggggcttcgcgctcttcttcttcttccagggactcagcacctggcagaaaacccctgcagagtcgagggagcacaaccgggactgcatcctcctcgacttctttgacgaccacgacatctggcacttcctctcctccatcgccatgttcgggtccttcctggtgttgctgacactggatgacgacctggatactgtgcagcgggacaagatctatgtcttctagcaggagctgggcccttcgcttcacctcaaggggccctgagctcctttgtgtcatagaccggtcactctgtcgtgctgtggggatgagtcccagcaccgctgcccagcactggatggcagcaggacagccaggtctagcttaggcttggcctgggacagccatggggtggcatggaaccttgcagctgccctctgccgaggagcaggcctgctcccctggaacccccagatgttggccaaattgctgctttcttctcagtgttggggccttccatgggcccctgtcctttggctctccatttgtccctttgcaagaggaaggatggaagggacaccctccccatttcatgccttgcattttgcccgtcctcctccccacaatgccccagcctgggacctaaggcctctttttcctcccatactcccactccagggcctagtctggggcctgaatctctgtcctgtatcagggccccagttctctttgggctgtccctggctgccatcactgcccattccagtcagccaggatggatgggggtatgagattttgggggttggccagctggtgccagacttttggtgctaaggcctgcaaggggcctggggcagtgcgtattctcttccctctgacctgtgctcagggctggctctttagcaatgcgctcagcccaatttgagaaccgccttctgattcaagaggctgaattcagaggtcacctcttcatcccatcagctcccagactgatgccagcaccaggactggagggagaagcgcctcaccccttcccttccttctttccaggcccttagtcttgccaaaccccagctggtggcctttcagtgccattgacactgcccaagaatgtccaggggcaaaggagggatgatacagagttcagcccgttctgcctccacagctgtgggcaccccagtgcctaccttagaaaggggcttcaggaagggatgtgctgtttccctctacgtgcccagtcctagcctcgctctaggacccagggctggcttctaagtttccgtccagtcttcaggcaagttctgtgttagtcatgcacacacatacctatgaaaccttggagtttacaaagaattgccccagctctgggcaccctggccaccctggtccttggatccccttcgtcccacctggtccaccccagatgctgaggatgggggagctcaggcggggcctctgctttggggatgggaatgtgtttttctcccaaacttgtttttatagctctgcttgaagggctgggagatgaggtgggtctggatcttttctcagagcgtctccatgctatggttgcatttccgttttctatgaatgaatttgcattcaataaacaaccagactcagtt

SEQ ID NO: 163 - DNA, 16079 bp, HOMO SAPIENS
tattctcacaccagagccgtgaccgagacccagaggtccgcttccggccacggccgaacagctgcaccgtgcgtaccgggaacggtcaaggcgcagctggaaccgctgcaaaaggcctccgggcgtaccggacaggtcgcaagggcgggggtccccacctagcggaaatgcacggaggccaacccctccccctgcccccgcgaggagcggggcggactcggcagccgccactccccaggctcacaggaagaaactgggacgctgcggacgcggaactggccagacccgcggcgcgtggcacgcgcgagccctcccgcgcatgctccacccgccggcctccagcccgcgccccgggccccgcctccctccctgcttctccccctctcccgtcagcctccctccgagtttggcccctccggccgggcgatcgacgttccgcgtgcgtgcgggcgcctgacttcacttccggctaacgcgctcggcttgccccctggccccggatggtgactggtggtggtgctgcacctcccgggactgtcactgagccgcttcccagtgtgattgtgctgagcgcaggccggaagatggcggctgcggctgcggcggcctcgggccccggctgctcctcggcggcgggggcgggggcggccggggtctcagagtggctggtgctgcgggacggctgcatgcactgcgacgccgacgggctgcacagcctgtcctaccaccctgcgctcaacgccatcctggccgtcactagccgcgggaccatcaaagtcatcgacggcacctcgggggccacactgcaggcctccgcgctcagtgctaaaccaggtggacaggtgaaatgtcagtatatctctgctgtggataaagttatatttgtggatgattatgcagtagggtgtaggaaggaccttaatggaatcttgttgttagacactgctctgcaaactccagtttcaaagcaggatgatgtggttcagcttgaattacccgttacagaggcacagcagctcttatcagcatgtttagaaaaggtagatatttctagtacagagggttatgatttgttcatcacacagctcaaagatggtttaaaaaatacatctcatgagactgcagcaaaccacaaagttgctaagtgggccacagttacatttcatcttcctcatcatgtgttgaagtccattgccagtgccattgtaaatgaactcaagaaaataaatcaaaatgttgctgccttacctgtggcgtcctcagtgatggacagattgtcttacctcttacctagtgcacgtccagaactcggagtggggccaggccgttctgtagacagatcactgatgtatagtgaagctaacagacgggagacatttacctcatggcctcatgtaggctataggtgggcacaaccagatcccatggctcaagctggattttatcatcagcctgcctcatctggagatgatagagccatgtgttttacttgtagtgtatgcctcgtttgttgggaacctactgatgaaccttggtctgaacacgaaagacattccccaaactgcccatttgtgaaaggtgagcacacacagaatgtgccattgtcagtcactcttgcaacaagtcctgcacagtttccttgtacggatggaactgacagaatatcttgctttgggtcggggagctgccctcattttctagctgctgcaactaaacgaggaaagatctgcatatgggatgtttccaaacttatgaaggtgcacttaaagtttgaaattaatgcctatgatccagcaattgtacaacagcttattctatcaggagacccaagctcaggagttgattcaaggagaccaactttggcgtggctggaggactcctctagttgctcagatataccaaaattggaaggagatagtgatgatttactggaggattcagacagtgaagagcattccagatcagattctgtgacagggcatacatcacagaaggaagccatggaagtaagccttgatataacagcactcagcattctccaacagccagaaaaacttcagtgggagattgttgcaaatgtgcttgaagatactgttaaggatcttgaagaacttggggcaaatccttgtttaacaaactctaagagtgaaaagacaaaggaaaagcaccaggagcaacacaacattccttttccatgtttattagctggaggtttattaacatataaatctcctgctacctcacccattagtagtaattctcacaggtcactggatggtttaagcagaactcagggtgaaagtatatcagaacaagggtcaactgacaatgaatcctgcactaattcagaactaaattctcctctggtaaggaggactttaccggttttgcttctttatagcatcaaggaatctgatgagaaagcaggaaagatcttttcacagatgaacaatattatgagtaaaagtttgcatgatgatggttttactgttccacagattattgaaatggagctggatagtcaggagcagttgttattgcaggatcctcctgtgacttacattcagcaatttgcagatgcagcagccaaccttacctctccggattctgagaagtggaactctgtgtttcccaagcctgggactttggttcagtgcttgaggctgccaaagtttgcagaggaggagaatctttgtatagactcaataactccttgtgctgacggaattcatttgttggtaggactgcggacatgccctgttgaatccttgagtgcaataaatcaagtagaggccttgaataatttaaataaattaaactctgcactatgtaatagacggaaaggtgagctggaatcaaatcttgctgtagtgaatggtgcaaatattagtgtaatccaacatgaatcaccagcagatgtacagactcctttaataattcagcctgagcagaggaatgttagtggtggatatttagtgctttataaaatgaattatgccactcggatagtgactttagaagaggagccaataaaaatacaacatatcaaagatccccaggacacaattacctcgctcattttgcttccacccgatatattggataatcgagaggatgactgtgaggaacctattgaggacatgcagttaacctcaaagaatggttttgagagagaaaaaacgtctgacatttctactcttggacacctggtaataaccactcagggaggatatgtaaaaatactagatctttcaaactttgaaattttggccaaagtggagcctcccaaaaaggagggcactgaggaacaggacacatttgtttctgtgatttactgttctggcacagacaggctgtgtgcatgcaccaaaggtggtgagcttcattttctccaaattggaggaacctgtgatgatattgatgaagctgatatactagtggatggatctctttctaaaggaatagaaccatcttcagaaggttccaaacctttatcaaatccttcaagtcctggcatttcaggagttgatttattggtggaccagccattcacccttgaaatcttgacatccctagtggagctaacccgctttgagactttgactccaaggttttcagcgactgttcctccatgctgggtagaagttcaacaagaacagcagcaaaggaggcatcctcaacatttgcatcagcaacaccatggtgatgctgctcagcatactcgaacttggaaactacagaccgacagcaacagctgggatgaacatgtatttgaattagtactacctaaagcttgtatggttggacatgtggacttcaaattcgttttgaactcaaacatcaccaatattccacagatacaagtgacactgctgaaaaataaagctccaggattagggaaagtcaatgctcttaacattgaagtggaacaaaatgggaaaccgtccctggttgatttgaatgaagaaatgcagcacatggatgtagaggaatcacagtgtcttagattatgtccatttttggaggatcataaagaagacattctatgtgggccagtatggcttgctagtggccttgatctatcagggcatgctggaatgttgacgttaacaagccccaaacttgttaaaggtatggcaggaggaaaatatcgttcgtttttaatccatgtcaaggcagtgaatgaaagaggaacagaagagatttgtaatggtggtatgcgtcctgtagtaaggcttccatccctaaaacaccagagtaacaagggttattcacttgcttcacttttggctaaagttgcagcaggcaaggaaaaatcatctaatgttaagaatgaaaatacaagtggcacccgtaaatctgaaaacctccggggctgtgatttacttcaagaggtctcagtcaccattcgaagatttaagaaaacctcaatttctaaggaaagagtgcaacgatgtgccatgttacagttttcagaatttcatgagaagcttcttaatactctttgcagaaaaacagatgatggccagatcacagaacatgcccagagccttgtgttggatactctctgttggttagctggagttcattcaaatggacccggaagctcaaaggaaggaaatgagaacctactttcaaaaacacgaaaatttctgtcagacatcgtacgtgtttgcttctttgaggcaggacgaagtatagcccataagtgtgcccgatttctagccttgtgcattagtaatggcaaatgtgacccatgtcaaccagcatttggacctgttctgttgaaggctttacttgataatatgtcatttttacctgcagcaacaactggtggttctgtctattggtattttgtcttactgaattatgtgaaagatgaagatctggctggatgcagtacagcttgtgcatctttgcttactgcagtgtccagacagttacaggacaggctaacaccaatggaggctttacttcagacaagatatggattatatagctcaccatttgatccagtcctctttgatttggagatgagtggctcttcttgtaaaaatgtttataacagcagcattggtgtccagtcagatgaaattgatttatcagatgtcctttcaggaaatggaaaggtcagtagttgcacagctgctgagggtagtttcacatctctcactggacttttggaagttgaacctctgcactttacttgtgtgtcaactagtgatggaaccagaatagaaagggatgatgcaatgagttccttcggggttactcctgcagtaggtggactatcatctgggacagttggggaagcctcgacagccctgagttcagcagcccaggtagctttgcagtctctctctcatgcaatggcttcagccgagcaacagctacaggtgctgcaagagaaacagcagcagcttttgaagcttcagcaacagaaagcaaagctggaagccaagttacatcagacaacagctgcagcagctgcagcagcatcagcagtaggtcctgttcacaactctgtgccttccaacccagtggctgcccctggattcttcattcatccatctgatgttattccacccactccaaaaacaacacctctttttatgactccaccactcactccacccaatgaagcagtttccgttgtgattaatgccgaacttgcacagcttttcccaggctcagtcattgatcccccagcagtcaatcttgctgcacataacaaaaattccaacaagtccagaatgaatccacttggttctggtctagcccttgcaatttctcatgcttcacattttcttcaacctccgcctcaccagtccattattatagagcgaatgcattcaggagcaagaagatttgtgaccttggattttgggaggcctatattgttgactgatgtattgattcccacttgtggagacttggcctctttgtcaattgacatttggacattaggagaagaggtggatggaaggcggttggtagtggcaactgatataagcactcattcactaattcttcatgacttaataccacctcccgtgtgcagattcatgaagatcactgttattggacgttacgggagtacaaatgccagagccaaaatcccattaggattttactatggtcatacctacatcttgccttgggaaagtgaactgaagttaatgcatgatcctctaaagggagagggagaatctgcaaaccagccagaaattgaccagcatttagcaatgatggttgctttgcaggaggatatacagtgcaggtataacttggcttgtcatcgtctggaaacccttttgcaaagtattgatcttcctcctctaaacagtgctaacaatgcacagtactttttacgaaaaccagataaggcagttgaggaagacagtagggttttttctgcttatcaagattgtattcagctacagcttcaactaaatttggctcataatgcagtgcagaggctcaaagtggcgctaggtgcaagccggaagatgttgagtgaaacatcaaatccagaagatttaattcagacatcttccacagagcagttacgtactatcatcagatatttactggacactttgctcagcctgcttcatgcttctaatggacactctgttcctgcagttttgcagagcacatttcatgcccaggcctgtgaagagctctttaaacacttgtgcatcagtggaaccccaaagatacggttacatactggtcttcttcttgttcaactgtgtggtggtgaaaggtggtggggtcaatttctttctaatgtccttcaggaattgtacaattcggaacagcttctcatctttccacaggatagggtcttcatgttactttcctgcattggtcaaagatcacttagtaatagtggagtattagaaagcttacttaatctcttggataatttattgtcacctcttcagccacagttacccatgcataggaggacagaaggagtactagatattcccatgatcagttgggttgttatgctggtgtccaggttgctggattatgtggcaactgttgaagatgaagcagcagctgcaaagaaacctttgaatggtaatcagtggagttttattaacaataatctacacactcagagcttaaatagatcttctaaaggcagcagtagccttgatagattatattccagaaaaatcagaaagcagcttgttcatcataaacagcaacttaacctactaaaagcaaagcagaaggcattggtagaacagatggaaaaagaaaaaatacaaagtaacaaaggatcatcatataaactcctggtagaacaagcaaaactaaagcaggccacttcaaagcactttaaggatttaattcgtttacgtcggacagcagaatggtcccgttctaatttagacacagaagttacaacagcaaaagaaagtcctgagatagaaccacttccatttactctggcccatgagcgttgtatctcagtagtccagaaacttgttctgtttcttctctccatggactttacatgtcatgcagatctcttattgtttgtttgtaaggttcttgcacgcattgcaaatgccacgaggccaactattcatctgtgtgagattgtgaacgaaccccagctggaaagactgctgttacttttggttggaactgacttcaatagaggagatatatcttggggtggtgcttgggctcagtattccttaacttgcatgctacaagatattttagcaggagaattactggctccagtagccgcagaagccatggaggaaggaacagtgggtgatgatgtaggtgcgacagctggtgactctgatgactcccttcaacagtcctcagttcagttgctggaaactatagatgaacctttgacacatgacataacaggtgcacctcctctgtcctctttggaaaaagataaagaaattgaccttgagttacttcaggatctaatggaagttgacattgatcctttagatattgatttggaaaaggaccctcttgcagccaaggtttttaagccaataagcagtacatggtatgattattggggtgctgattatgggacctacaattacaacccttacattggaggtctgggaattcctgtagcaaagccaccagcaaacacggagaagaacggatcacagacagttagcgtttcagtctctcaggccctggatgctcgcctagaagttggacttgaacagcaagcagaactgatgttgaaaatgatgtctactctggaggcagattccattttacaggcattaacaaatacatctcctacattatcacagtctcccactggaacagatgattcacttctagggggtttacaagcagcaaaccaaaccagccagcttattatacagttatcatctgtcccaatgttaaatgtttgtttcaacaaacttttttccatgcttcaagtccatcatgttcagttggagtcacttctccaattgtggctcacactgagcctgaattctagttcaactggaaacaaagaaaatggagcagacatatttttatataatgctaataggatacctgttatttcattaaatcaagcatcaataactagctttctcacagtgttagcttggtatcccaatactttgctccggacatggtgccttgtgcttcatagcctaacactcatgacaaacatgcagcttaattctggttccagcagtgccattggaactcaggagagtactgctcatttgttggtttcagatccaaacctaattcatgtattagtgaaatttctttctggcaccagtccacatggaacaaatcaacacagtccacaggttggtcctacagctacacaagctatgcaagaatttcttactcgattacaagtgcatctttcttcaacatgtcctcagatattcagtgaatttttgctcaagctaattcatatactttcaactgaaaggggtgctttccagacaggccaaggacctctcgatgcccaagtgaagctcttagaattcactctggagcagaattttgaagtcgtttcagttagtactatttctgccgtgatagaatcggttacatttttagtgcaccactatatcacttgctcagacaaagtaatgtcaagaagtggatcagatagctccgtgggtgctcgagcatgctttgggggactctttgccaatcttattcgtccgggtgatgcaaaagcagtttgtggcgaaatgacaagagatcaactcatgtttgatttgttaaaacttgttaacattttagtgcagctgcctctttcaggcaatagggaatacagtgcaagagtgtctgtgaccacaaatacaacagatagtgtttcagatgaagaaaaagtctcaggaggcaaagatggcaatggaagcagtaccagtgttcaaggatcgcctgcatatgttgctgacttagtcttagccaaccaacaaattatgagccagattttgtctgctctgggcctgtgtaatagcagtgccatggcaatgataattggagcaagtggattacatctcactaaacatgaaaactttcatggtgggttggatgccatatcagttggggatggattatttaccatactgacaacccttagtaaaaaagcttctacagtccacatgatgctgcagccaattttaacatacatggcctgtggatatatgggcagacaaggctctcttgctacttgccagttatctgagccattattgtggttcattttgagagtattggatactagtgatgccttgaaagcatttcatgatatgggtggtgttcagctcatatgcaataatatggttactagtacaagggctattgtgaacactgcaagaagtatggtatcaactattatgaaatttcttgactctggtccaaataaagctgttgacagcacattgaaaacaagaatactagcttctgagcctgacaatgctgaagggattcataactttgcacccctcggtacaatcacatctagcagtcctactgcccaaccagctgaagtgctattgcaggccacacctcctcacagaagagctcgctctgctgcttggtcctacatctttcttccagaggaggcttggtgtgaccttaccattcaccttcctgcagcagtgctgcttaaggagatacatatccagcctcatcttgcatctcttgcaacctgcccttcctcagtgtctgttgaagtaagtgcagatggggtaaatatgctacctttgtccactcctgttgtcacaagtggcctcacctacataaaaattcagcttgtaaaagccgaagtagcttctgctgtctgccttagactacatcgtccacgggatgccagcacattaggcctttcacaaattaaattattggggctcactgcttttggtaccacctcttctgcaacagttaataatccattccttccatctgaagatcaggtatccaaaacaagtattggatggttacggttattacatcattgccttactcacataagtgatctagaaggaatgatggcaagtgcagctgcacctactgctaatctgctgcagacttgtgcggccttattgatgtcaccttactgtggaatgcattcacccaacatcgaggttgtgcttgtaaagataggactgcagtctactagaattggcctgaagctcatagacattctcctgagaaattgtgcagcatcaggcagtgatcctacagatttgaatagtcctttactttttggaagactaaatggactctcttctgactctacgatagatattctttaccagcttggaacaactcaggatcctggtacaaaagacagaattcaggccttgttaaaatgggttagtgattctgcaagagtggctgctatgaagagaagtggcaggatgaactacatgtgtcctaactcctcaacagtagagtatggtcttctgatgccatctccttctcatttgcactgtgtagcagccattctgtggcatagttatgagctgcttgtagaatatgacttaccagcactcctggaccaagagctctttgagttactttttaattggtccatgtctcttccctgcaatatggttttgaagaaagctgttgacagtctactttgctcaatgtgtcacgtacacccaaactatttttctttgctcatgggctggatgggaattacccctcctccagtgcaatgtcatcatagactgtccatgacagatgatagcaaaaagcaggatcttagttcatctttaacagatgactctaaaaatgcacaagcacctctcgcattaactgaatcacatttggctacccttgcttcctcttctcaatctcctgaagctattaaacaattactagactcaggtttgccttctcttcttgtgaggagtctggctagtttctgctttagccacatttctagctcagaaagcattgcccagtcaatagatatttcccaggacaaactcaggcgccatcatgtcccacaacaatgtaataagatgcctatcacagccgacctagttgctcctattcttaggtttttgacagaagttggcaatagccatattatgaaagattggcttggtggttctgaagtcaatccactatggacagcacttctgtttttattgtgtcactctgggtccacttctggaagccataatttaggtgcacaacagaccagtgcaagatcagcttctctttcttcagctgctacaacaggactgactactcaacagcgcacagcaattgagaatgcaactgttgcgttctttctacagtgcatttcatgccatcctaataatcaaaagctgatggcacaggttctttgtgaactatttcagacatctcctcaaagagggaaccttccaacatctgggaacatttcagggtttatacgaagattatttttacagttgatgctggaagatgagaaagtgacaatgtttcttcagtctccatgtccactgtacaaaggtagaattaatgctactagccacgtcatccagcatccaatgtatggagcaggccacaaattccgtactcttcatttgccagtctcaacaacattatcagatgttcttgacagagtgtcagatactccaagtatcacagctaaattaattagtgaacaaaaagatgacaaagaaaagaaaaaccatgaagagaaagaaaaagttaaagcggaaaatggatttcaagacaattacagtgttgttgttgcctctgggctgaagtctcaatctaaacgtgctgtgtcagctacaccacctcgcccaccatccaggagggggaggacaatacctgataaaataggaagtacttcaggagcagaggctgccaacaaaataattactgtcccagtgtttcacctgtttcacaaactcttggcaggccagccattgccagctgaaatgacacttgcccagcttttaactctcctatatgaccgaaaacttcctcagggttaccgctcaatagatctgactgttaaattgggatcaagagttataacagaccccagtctatcaaaaacagattcttataaaagactacaccctgaaaaagatcatggagacttacttgctagctgtccagaagatgaggctctcactccaggtgatgaatgcatggatgggatactggatgaatctttgcttgaaacctgtccaattcagtcaccattacaagtttttgcaggaatgggtggactggctcttattgctgaaagactacccatgctatatccagaagtaattcaacaggtgagtgctccagttgtaacatctaccactcaggaaaagccgaaggatagcgatcagtttgaatgggtgaccattgaacagtcaggggagttagtttatgaagcaccagaaactgttgcggctgaacctccacctatcaagtcagcagtacagaccatgtctcccatacctgcccattctttggctgcttttggattatttcttcgtcttccgggctatgcggaagtgctactgaaagagagaaaacatgcccagtgccttcttcgattggtattgggagtgacagatgatggagaaggaagtcatattcttcaatctccatcagccaatgtgcttccaacccttcctttccacgtccttcgtagcttgtttagcactacacctttgacaactgatgatggtgtacttctaaggcggatggcattggaaattggagccttacacctcattcttgtctgtctctctgctttgagccaccattccccacgagttccaaactctagcgtgaatcaaactgagccacaggtgtcaagctctcataaccctacatcaacagaagaacaacagttatattgggccaaagggactggctttggaacaggctctacagcttctgggtgggatgtggaacaagccttaactaagcaaaggctggaagaggaacatgttacctgccttctgcaggttcttgccagttacataaatcccgtcagtagtgcggtaaatggagaagctcagtcatctcatgagactagagggcagaacagtaatgcccttccttctgtacttctcgagcttctcagtcagtcctgcctcatcccagccatgtcatcttatctacgaaatgattcagttctggacatggcaagacatgtgccactctatcgggcactgctggaattgcttcgggccattgcttcttgtgctgccatggtgcccctattgttgcccctttctacagagaacggtgaagaggaagaagaacagtcagaatgtcaaacttctgttggtacattgttagccaaaatgaagacctgtgttgatacctataccaaccgtttaagatctaaaagggaaaatgttaaaacaggagtaaaaccagatgcgtctgatcaagaaccagaaggacttactcttttggtaccagacatccaaaagactgctgagatagtttatgcagccaccaccagtttgcggcaagcaaatcaggaaaaaaaactgggtgaatactccaagaaggcggctatgaaacccaaacctttgtcagtattaaagtcacttgaagaaaaatatgtggctgttatgaagaaattacagtttgatacgtttgaaatggtttctgaagatgaagatgggaaattgggatttaaagtaaattaccactacatgtctcaggtgaaaaatgctaatgatgcgaacagtgctgccagagctcgccgccttgcccaggaagctgtgacgctttcaacctcactgcctctgtcttcatcctctagtgtgtttgtacgctgtgatgaggagcgacttgatatcatgaaggttctaataactggtccagcggacaccccttatgcaaatggctgctttgagtttgatgtgtattttcctcaagattatcccagttcaccccctcttgtgaatctagagacaactggtggtcatagcgtgcgattcaatccaaacctttataatgatggcaaggtttgtttaagcatcttaaacacgtggcatggaagaccagaagagaagtggaatcctcagacctcaagctttttgcaagtgttggtgtctgtccagtcccttatattagtagctgagccttattttaatgaaccgggatatgaacggtctagaggcactcccagtggcacacagagttctcgagaatatgatggaaacattcgacaagcaacagttaagtgggcaatgctagaacaaatcagaaacccttcaccatgttttaaagaggtaatacacaaacatttttacttgaaaagagttgagataatggcccaatgtgaggagtggattgcggatatccagcagtacagcagtgataagcgggtaggcaggactatgtctcaccatgcagcagctctcaagcgtcacactgctcagctccgcgaagagttgctgaaacttccctgccctgaaggcttggatcctgacactgacgatgccccagaggtgtgcagagccacaacaggtgctgaggagactctaatgcatgatcaggttaaacccagcagcagcaaagaactccccagtgacttccagttatgagctgcattgatgtggacttcatagacacaaaggcttcgaagcacaagccaaatatgtcaatatttgtatgtaagaaactaattatgtaataggtaatgaaactgaaactatactatgcccttaaggagatccagtttaattcaaggtgatcttttatttacctgtacaggagtgtaaacttttttgtgcttttatttttcaattgtgagaaccactgattggtatgttcaacaaatttgtgtatacaaagaaatggataaatcactgctatataagggaaactaccttaggaaagaatgtttactgaatgtttattttattttattttttttttactatagagtgaggggttgttaacaaagaatatatattggtcattcttacaactactatttaaagtcagcaacttttcactgaatttgatagattttatgtttggccatatcttcatgctcacatttgatttctgaagacctcctacatacacttcaataaaagttaaatggacatactccctcttttttgatttactggtacatttttaaaataataaatctgccataaaatgcattatatctggagacttgcacttgtatggatgaatttattacattcaacatatttaattttatgccttctaattctaagatgcagaaaaaaataaatgaacatgattttattctatgccaacatttgggcctctgaatgtatctgttatttgaatttaagtatttgaaaaggaatggtcaatttgaaagtcattctaaactgattttttttttctaaagggctccttttttcctggactatgtggttttatgactaaagtcacatgtatgtattaaacattgaggctctgtagaggagagaggatgtacctctctggtgctgttacagtacattctgtacctgccatacaggctcattttcatgcaaattcttcctagagccaaataaataaagacttaggtgaattagtatgtcttgtttctaaaaaaaaaaaaa

SEQ ID NO: 164 - DNA, 4223 bp, HOMO SAPIENS
agtgcatcggccccgggtctgtccgggcgttgcgggattggggcctgggaacgctcggcccccggcagccgagaagcccgtgactgggctgagcagcaccatcccagccctggggcctgctgactgcccagtcccggcttcacctgcagcgaacccggagcgttgctatcctccaccggactgtcaggctctgcgcgccccgcggaggtcggcggcgaccagcagcgactgcggagcgacggcgggcggccccgggcatgtacgcccccggaggcgcagggctgcccggcgggcgccggcggaggagcccgggaggcagcgctctgcccaagcagccggagcgtagcctggcctcggccctgcctggcgccctgtctatcacggcgctgtgcactgccctcgccgagcccgcctggttgcacatccacggaggcacctgttcgcgccaggagctgggggtctccgacgtgttgggctatgtgcacccggacctgctgaaagatttctgcatgaatccccagacagtgctgctcctgcgggtcatcgccgccttctgtttcctgggcatcctgtgtagtctctccgctttccttctggatgtctttgggccgaagcatcctgctctgaagatcactcgtcgctatgccttcgcccatatcctaacggttctgcagtgtgccaccgtcattggcttttcttattgggcttctgaactcatcttggcccagcagcagcagcataagaagtaccatggatcccaggtctatgtcaccttcgccgttagcttctacctggtggcaggagctggtggagcctcaatcctggccacggcagccaacctcctgcgccactaccccacagaggaagaggagcaggcgctggagctgctctcagagatggaagagaacgagccctacccggcggaatatgaggtcatcaaccagttccagccaccccctgcttacacaccctaatgccagccctgggctctcttcctcggcagcccctccctcaactctgcagctcctctcgcacccagaggagctcctttccccagcaggcctcactggtaggatcctgaccatcttctccaaaccttccccaggagagactctgcctttagggtcatccaagtatccctgctctcagaaccggaggtccactggttttctataatgtactctttccctcctgccacatcctgcccccttcacattcacgagtcattaccagccagggaaggtcatccaagtttcctccagcatgggcgatatctttgggaccgagactttccttggagagctgctgagagcggacagtcccaaaaacaagtgtcaaagggcccaagggaaaggggactgtgccctggaggctcacttcacagggatcagtgtttgctccacagctgtagctctgggctgacgccccccagaccccttccttctcggagtgacccgcccccaggccacctgctccggggagttctgtgcactttactctttggacttctcctcacgtgtgccctggttttatggggagagggaatcgctgttgggaaggcagagcagttgcaaccctctctgcccttgcttcatgtggctggagcccaggcaaggagagcaggagccagcgtgagactgaggccccctggtgcctatcaaggaccagagtgaaggggactacatctcccagcccttcaccttttaaatatgagtggttttaaaaggaaaaaagtgaaaccaggcaacagcaacaatattctgtttttaaaatagggacaagactgttgtcactttttagacatgtatcccattccttttggctctgcaatatttggggctgtagctccttccaagcccatggtagtccctccccgagtctctcccagtagaatgcagcctcccttccctggccccttccctctcagtgacggtgactccctggggccttctcgtggaacccagaggggctgaggactgtggcctggctggcgggccagcgtggtgctcctcaggactgcagcactgagatggaacctggcctcagtttaggaacaggggccacaacagggcaggaacccaccaccctccacataggaatacaaccagtggggccacatcatgtgaggcatcagacccacactgtcagcccagcaggccgggctgtgtccttcagaccctgtgctgccctagactctgactcgggactccagcttgccacgtgccctctcccctcttgaatgtactctggtcttgcagtgtgctgctgggacttccttgctcagccatcactctggtcaccttgtttgctctgggtctggctgaattttctgccctgagatctgggcataaagtggatgaaacttgaaagaccttcagtgtagatccagatggccaacctgtccttgttaagttacttgcttcttgggaatcagtgtcccctgctgagctgaaaaggaaatggattccaatctcttccaacctttaaggtgatagatagtttgagcaagactggagaatggacaacactatgaagctgtggctagaaagggactgtcatgtcccatcctttggccagattgactggggatgtccggacagatgcctgcatgggtggtgagggccacatctgcacacgagccagtggctgcttgcagttcactgctgtgatgccagagtgtgttcaaaggtgactctcctgctcttctggactcttctctcaggcaagaaaggctgcaggctgcctgctatgtgatgcctgagcacaaagccaaggaactgaactaagtctttctgttaagtcctgagtttgtcattggcaggtttacttgtggccagctctctctgcccttgggtgtctgagcaggcagaccagaagaccaggcactggacctgcatgccaaagggactggtcatctcctgaggacctgtacatgaccctgtggactgttccgcacgatccggaacccactttttattcactccccatgtctttggccttcctcttctttctctttccctctgccatcctgacactgatagtttgtcatataaattccccgggttgtgtttttttttctagaaaaaaattaaaagggaaaacaaaaccaaaaaaaccagaaaccacgaataagaatggaaatgacaatggctgcctgtcatttttctgtcacgattttcctgatttggtttgttccctttgtctcagagaagcaggagatgttgatgaggctgtatttttttttctttttcttgtttttgagacaagagtctcgctctgtcacccgggctggagtgtaacgtggcatgatctcagctcactgcaacctctgcctcctgggttcaagcgattatcctgcctcagcctcctgagtagctgggattacaggcatgcgccactatgcccagataatttttttgtatttttagtagagacagggtttcaccatgttggccaggctggtctggaactcctaacctcaggttatccacccaccttggcctcccaaagtgctgggattataggcatgaaccaccgtgcctggccaaagatgtaatttaaaatagttaggagggacttggcatgggccagctccgtgcatggcattttcacccccagagcttcctaatcctgttttcacacaggaagtttctaggtctttctagaacagctagaaatagtagctgactcccgcccaaggcccaaccttcaaaccctgagctcttcaggctgcatcctctggtgagctatagaggagaacgtggctcctaaactctagccatcctgtgggaggaaatagacttctttgggctgtggcttgcagaacaaactacactttttttccctctattgtttaaattttatttaataatttgtgtgtttttctgtctttattttctgtatttcacgtgttccttcactccctagaaactgcactttctttgaaaccataggtaatgaatcttactaggagaggcatggggatagagacagttctgggagtgtgacctgtaagcctcctgtagggcagtgccaggccttgattgcccacgttctctccgttccttcttccttcatacatttgaccacacagcctacacccagccccgagtgtgcatcacggtaaaagagctgagggctctcttcagggagcagcccatttaggtctcttttgttgttgttagggagaatacacatctttcttggaaaaaaaaaaaaaaaaa

SEQ ID NO: 165 - DNA, 5389 bp, HOMO SAPIENS
taaatgaagtaacagcaaaatagcgcagcatctcagctgttccaggttcctcaaataagttttacttttgcaaaaccaacctcaaacttcctatattctctgttctgcattataagcaacatgaccagcagccacgtttgttgtaattttttaaatatgtggaaaaaaagcaagatatcaaccatgtattaccttaaccaagatgccaaattatctaacttgtttctccaggcaagcagcccaacaacagggacagctcccaggagccagtcaaggttgtctgtctgtccatccactcaggacatctgcagaatctgtcactgcgaaggggatgaagagagccccctcatcacaccctgtcgctgcactgggacactgcgctttgtccaccagtcctgcctccaccagtggataaagagctcagatacacgctgctgtgagctctgcaagtatgacttcataatggagaccaagctcaaacccctccggaagtgggagaaactacagatgaccacaagtgaaaggaggaaaatattctgctctgtcacattccacgtaatcgcgatcacctgtgtggtttggtctttgtatgtattgatagaccggacagcggaggaaatcaagcaaggcaatgacaatggtgtccttgaatggccattttggacaaaactggttgtggtagccattggcttcacaggaggtcttgtcttcatgtacgtacagtgtaaagtctatgttcagttgtggcgcaggctgaaggcctacaaccgtgtgatctttgtacaaaattgcccagacactgccaaaaaactggagaagaacttctcatgtaatgtaaacacagacatcaaagatgctgtggtagtgcctgtaccacaaacaggtgcaaattcactgccatctgcagagggtggcccccctgaagttgtatcagtctgatggaacctgttgggagtttcttcaccgaagaatatctttctagccctcagccactacaaatgacagaagtgatcttgaattatttactcccttcagctcctcctttctcctactgacacatttttcctgactttgttcaaagaggaaaggagaaaaacaaacagaccaaatgcccaggagcccatgaagtaatagcgtaaagtaaagtatgatatggaaatgtgaagtttgcaagagaatgatttccaagacaattaagaactactggggcaatgaatgcttttaggcagtaatcaaagattaaatggacccatgatactcttcttcacagtaacaggggaaaagttcaagaatacagacttgaattgcgatgtgtattacttctagggccttgtaatgttaactgtctcatctggaaataactaacatatttggttttaagcctgaaattgtctgcattatccctaagtcacattggaagtgaacttggaggatgcatattttgatatgctttgacagctaacagatttgtatggtttagtggagtctggttattttgacagatgcatgttttttttaaatagatgcaatatacatttgaagacattgatatttggaattaattacgtttgtttaagtcacgcaaaagattttcagaaaatgttcggatataattagctctgttaaatacccacagaactgttatcaggtcttatatttattttcatctggttcctctaatacagtgctgtccaatagaaacacaacagccacaaatgcaggccacagatgcaaatatttaacttcccagtagccctattttaaaaagtaaaaataaatgtttgtttgttaaaatgaattttgattttttaaaaacactatatgttatttcaacatgtcatcaatataaaaaattgattgattgattgatagtttacatctgtttcttgaaccaagttttcaaaatccagttggtaatttaaaagtacacttcaacttgaattaactatattggatagcacagccgtaaaattagagactaagcttctgctttatttaacagttgttgagtatttcaaaacagtttaattcattcttttatttcaaagtcacaaaagttagttatgatttttaaaagcattaaattaagtgtcctcattttaaagtcagatgaagttcacatctctaaagggtaaaaatccaaaagtatagaaagataaaacaatcaatctgcctatagcagagttgtgaaataaataaattgttactatgaagtacttacaataggggaataaaattacctatttttgttattaaatcaaatgtgtaaggcttatttcatccatatgaggtgtcaacttgacagatgatgagtaattatgactaagaatctagcccttacttttaaaagctgacaggatttcccttgctcagttagaaaacaaaaatattcaacagattctgtgataagtaattaatcgtttaggtttgacagttgattattgtgttctttgcatattcatgtaaaactgatgtgtgaatgacattgcagtgagctagattaacggtgattatagatacagtagcctgtcaaagaaagatgtcctacattaaaaaaggtgacttatttttgttagctgtcattatttattaacatgaaaaggcaatgatggccataagaaccaaagcatgagtatcacactgcacaaatctgggtatcacatggatgcactttgtaattatcagtgtgcttgttcttcacagatcataggaaaaagggaaaaaaaaaacaaacctttaaatgaggagaaagatggtataaatattagtagtggctgacactgagtccagatagtcttgattcctagaaataaacaaaaggtaaacaatgtcaattttgtgtgtgtgtatggcgtgtgtgtagtcatgtatatatgcggggaaaatgttaaggtattcagtcaggaaacaaaaggtttaaaactcatctttcttaaaacttgttataagcacagggaaagcaaagttgaggtaactaaactgaaccaaaaattctgtataaataaggatataagtaattaacgttttaaaaaacatgtggaccttaaacaaactgtatattaaattcctcttaaatgcccattttaaatatttaagataaatacatttatgaataacaaatctgtgggtgatttaaccatggcaccatatccaagggattaaccttaatgcaattttcctgttaattgtcctaagctttttactaatccattttccctgtgggttagtaatggcaacatgctgcttacagatattcccggggaaaaacatccagacaccagcaaacaaagaaatgttgatttctcttttgtttgctctgaaagtaaaataattatttactttaattaacatggaaaatattgtttaaattctgtacgaacctaaacaagatacgttgcagggctgatttcacagtggaggatgatcggctaaaataaagcctcatttattaagggctacacttttaacactaagaaaacatttctagaataaaaagcaaaggtaagcattattctattaatagtaaaagaggacatgggattttaaaactatacctaaattcttgcaattaacttttatgggcttggacattgttgaaatgagaaaataatataatatagcttcctggcaggttaaaagtcaacacttgattttgctattcttctgactttttgaaaccctgaagttctgaatttcaagcttttaagaagcttttcagcaatggttgtttgtttatggttcaaacatctgaaataactacctgcatttaaaatctaatgttgattattttctttttacattctgtgtggcaatggaacatttgccctttcaaacaataaaacgatttagctttgtggcagtgcttttttgtagactgactgactatacccttcaaaaagaaaaactgctctacggaatgcaaattttgaggcatgtttacctgctcgtggaagaaataaaatggaattgaaaaaaaaaggactaaaattgaagaatgaaattacagttgtgttaaaaaccttggctctttataatcatgaatcttcagtattaaaccagacattgatgctgttaatttttttaaagaactatcactcttatcgtacaggagtaaagattaaattgtaaaagaaagaaattccaattttttaaaaagtaaagcccaaaaggcaattaagcttaagtacaaaaacaaaataaaaatgaacaaaatctaaactaaagtgagcccaacaacctgagatacagcaatgtgtaacctgaaggaagataggtgtagactgaaggagtctttcaaaacaccccagcattaaatctcactctgcgctgcttctacacgtgattatagtcccagacagacgacctcatggttttttatcttgttttacaaaaggtccttgggtactctttaaaacatctattctttggcaggaaaattagctcattagaacaatgacaccattaagggacattataagggtcctggggctgaggtgggaagatttttctatctgccccatatagtttacccttccttgccttgaaaatgaatattatagaacagagtacagctcttaaaagttattagtatcattattattatagttgttatataatactttaattaagaaagatgaaaaccttttttctttcctaagtcagcccaatggtgctattttacatatcaacacagttgaaaggaagtactgttattttgggctgcagtgtttcctccacatctaaagaaagcccattttgaaactggatactgcattaaaacaaagaaggaaaaattattttaactgtgtgcagtttttgaaattaggcatttgtactattttggttttacataattctcttgcattaacaatttactgttttgtgaatcatgtgtactaaagcaaattaagaaaaagaaaataattatctgtgaaagactttgtatattaaacaagtgacgcaaaccttagttgtggtttccacaatttttgcctaacagactgatatttgtatttgcaacatccaaacacacatacattttttaagattttacaagggtctgaacatataattattttaaagcaaacctacgttgactaactcatgacatggtacaaataaataaatacacaaacagagggaaaccaatgaaaataaactatgtggactttcaaacctgctttaaaaaaagagttcaagagaaatcacaatgtaatctaaagcgggactgtctcaagaataagtcttggatatagaaaaataagcatataacagcatttttctgttcagagataatagtggattcagataattgcatggataataaacattaaaagcaagatattagaatctaagaggtttggtgatagcaaaaaacaaagctgtttcc

SEQ ID NO: 166 - DNA, 3571 bp, HOMO SAPIENS
aagccccgcccgttcctccgaaattgggtcgcagtcccaccctctctcctagtacttcctgttctcggctaaccctggcgctgggccgggggctggagagtgaccgtggtctgagtgacctggggcggctgcgtgggccggggtgggcctcaaagccgggcaccagacgggaggggcggcgctcgggccgcgcgctgcccgcgccgggtcctggcgggcggcgaggctggggctgactcctgcctcaggatgccgggggaggaagaggagcgggccttcctggtggcccgcgaggagctggcgagcgccctgaggagggattccgggcaggcgttttccctggagcagctccggccgctactagccagctctctgccgctagccgcccgctacctgcagctggacgccgcacgccttgtccgctgcaacgctcatggggagccccgaaactacctcaacaccctgtccacggctctgaacatcctggagaaatacggccgcaaccttctcagccctcagcggcctcggtactggcgtggtgtcaagtttaataaccctgtctttcgcagcacggtggatgctgtgcaggggggccgagatgtgctgcgattatatggctacacagaggagcaaccagatgggttgagcttccccgaagggcaggaggagccagatgagcaccaggttgctacagtcacactggaagtactgctgcttcggacagagctcagcctgctattgcagaatactcatccaagacagcaggcactggagcagctgttggaagacaaggttgaagatgatatgctgcagctttcagaatttgaccccctattgagagagattgctcctggccccctcaccacaccctctgtcccaggctccactcctggtccctgcttcctctgtggttctgccccaggcacactgcactgcccatcctgtaaacaggccctgtgtccagcctgtgaccacctgttccatggacacccatcccgtgctcatcacctccgccagaccctgcctggggtcctgcagggtacccacctgagccccagtttacctgcctcagcccaaccacggccccagtcgacctccctgctggccctgggagacagctctctttcttcccctaatcctgcaagtgctcatttgccctggcactgtgctgcctgtgccatgctaaatgagccttgggcagtgctctgtgtggcctgtgatcggccccgaggctgtaaggggttggggttgggaactgagggtccccaaggaactggaggcctagaacctgatcttgcacggggtcggtgggcctgccagagctgtacctttgagaatgaggcagctgctgtgctatgttccatatgtgagcgacctcggctggcccagcctcccagcttggtggtggattcccgagatgctggcatttgcctgcaaccccttcagcagggggatgctttgctggcctctgcccagagtcaagtctggtactgtattcactgtaccttctgcaactcgagccctggctgggtgtgtgttatgtgcaaccggactagtagccccattccagcacaacatgccccccggccctatgccagctctttggaaaagggaccccccaagcctgggcccccacgacgccttagtgcccccctgcccagttcctgtggagatcctgagaagcagcgccaagacaagatgcgggaagaaggcctccagctagtgagcatgatccgggaaggggaagccgcaggtgcctgtccagaggagatcttctcggctctgcagtactcgggcactgaggtgcctctgcagtggttgcgctcagaactgccctacgtcctggagatggtggctgagctggctggacagcaggaccctgggctgggtgccttttcctgtcaggaggcccggagagcctggctggatcgtcatggcaaccttgatgaagctgtggaggagtgtgtgaggaccaggcgaaggaaggtgcaggagctccagtctctaggctttgggcctgaggaggggtctctccaggcattgttccagcacggaggtgatgtgtcacgggccctgactgagctacagcgccaacgcctagagcccttccgccagcgcctctgggacagtggccctgagcccaccccttcctgggatgggccagacaagcagagcctggtcaggcggcttttggcagtctacgcactccccagctggggccgggcagagctggcactgtcactgctgcaggagacacccaggaactatgagttgggggatgtggtagaagctgtgaggcacagccaggaccgggccttcctgcgccgcttgcttgcccaggagtgtgccgtgtgtggctgggccctgccccacaaccggatgcaggccctgacttcctgtgagtgcaccatctgtcctgactgcttccgccagcacttcaccatcgccttgaaggagaagcacatcacagacatggtgtgccctgcctgtggccgccccgacctcaccgatgacacacagttgctcagctacttctctacccttgacatccagcttcgcgagagcctagagccagatgcctatgcgttgttccataagaagctgaccgagggtgtgctgatgcgggaccccaagttcttgtggtgtgcccagtgctcctttggcttcatatatgagcgtgagcagctggaggcaacttgtccccagtgtcaccagaccttctgtgtgcgctgcaagcgccagtgggaggagcagcaccgaggtcggagctgtgaggacttccagaactggaaacgcatgaacgacccagaataccaggcccagggcctagcaatgtatcttcaggaaaacggcattgactgccccaaatgcaagttctcgtacgccctggcccgaggaggctgcatgcactttcactgtacccagtgccgccaccagttctgcagcggctgctacaatgccttttacgccaagaataaatgtccagagcctaactgcagggtgaaaaagtccctgcacggccaccaccctcgagactgcctcttctacctgcgggactggactgctctccggcttcagaagctgctacaggacaataacgtcatgtttaatacagagcctccagctggggcccgggcagtccctggaggcggctgccgagtgatagagcagaaggaggttcccaatgggctcagggacgaagcttgtggcaaggaaactccagctggctatgccggcctgtgccaggcacactacaaagagtatcttgtgagcctcatcaatgcccactcgctggacccagccaccttgtatgaggtggaagagctggagacggccactgagcgctacctgcacgtacgcccccagcctttggctggagaggatccccctgcttaccaggcccgcttgttacagaagctgacagaagaggtacccttgggacagagtatcccccgcaggcggaagtagctgagggcaagggtcccgatgagggtcccatggcctgctccctcaggaacagctccagcaccaataaagaggcatcttaccacccaggaaaaaaaaaaaaaaa

SEQ ID NO: 167 - DNA, 6320 bp, HOMO SAPIENS
aggcgcggacgcaggttacagcagcgcttggcctctgctgatgccgtcgttatcctacccctcccccgtcccagctctacggcggccgcgcgctccaggccggtcgctccaccccccggctcccgggactgtggactccacgaccctgtcctcggccctgtccgcgccgaagcagcccgggactgcgcagcgccccgcgtgccgacatgggaaagtctctttctcatttgcctttgcattcaagcaaagaagatgcttatgatggagtcacatctgaaaacatgaggaatggactggttaatagtgaagtccataatgaagatggaagaaatggagatgtctctcagtttccatatgtggaatttacaggaagagatagtgtcacctgccctacttgtcagggaacaggaagaattcctagggggcaagaaaaccaactggtggcattgattccatatagtgatcagagattaaggccaagaagaacaaagctgtatgtgatggcttctgtgtttgtctgtctactcctttctggattggctgtgtttttccttttccctcgctctatcgacgtgaaatacattggtgtaaaatcagcctatgtcagttatgatgttcagaagcgtacaatttatttaaatatcacaaacacactaaatataacaaacaataactattactctgtcgaagttgaaaacatcactgcccaagttcaattttcaaaaacagttattggaaaggcacgcttaaacaacataaccattattggtccacttgatatgaaacaaattgattacacagtacctaccgttatagcagaggaaatgagttatatgtatgatttctgtactctgatatccatcaaagtgcataacatagtactcatgatgcaagttactgtgacaacaacatactttggccactctgaacagatatcccaggagaggtatcagtatgtcgactgtggaagaaacacaacttatcagttggggcagtctgaatatttaaatgtacttcagccacaacagtaaaaactggaagagatggatttaaagaagaaatatctattgatatttcctatactctcaatgaagaggtatttcctaataggagaccttaaattgaacaaacctaaagtttacacttctaagagtacagttaaaagtatgtggacctgcagttcttgtaactctccactctgtgttaatgatatatttgtactaggatcttttacttgaatctaaatttactggttgatttccttctccagcctatcccctacagggaaaagctgatacttcccctatagtacaataaataattatttaaaagtcatagctccagtcactactgaaaacataattttggtgataaacataatttgagaaacttaatttctgaatgtttttatagaaaattactgaaagtctattactcatggaagacttttaaagaataaccttttttcctgttttataaattcccattgttatatggtagtatttcagctacacaatattttagcttttagctagacatttatagcttttcatttgttgaaatggtaatcatctgcatgtttttgtcacttatttcaggttagtgattgcctaacacttataagccaaaataatctttgcaaaattccatacctaaaattttgaaagcccctaatgttttcacacatctttctgtattagttatagttttgtgaaatctttgtgtgatcttcaaacattatcatttaatgtacaatactgtaaataaactgtgcatggcttttatacagctttagtaaatgtcaaataaagtggtacagactcattacaacaagtttctcataaaaatacaataaataggaaaatgaaattcagaaacccatagactgggaataggttccagttacagcttggatctggcataaaataaatttgaaataaaatattttgatgctccatttttttatgttgcttttcatactaaagaatggtgtagacatgttttgcaactgttaggtacccagttatcaattttatcaatgttttagaggaggaaattatttttttggtagaaattgttcaagaaatccttaattgaatgtcattaaatgatggtggccaaaataaaacctatttagaaatttaatcactttgcacatcacttggaatatgatgcctctagtagttacttttttatagttttctacttttggttttatttaaaattgttttcaaatatagattattgacttattcaactttgctgttttatattttcagtatcatttttcatttttttttttttttgtcttttcacttaccaagttctagggacatttaaaatatgtactaagtgtaggagtggttatgataccaaaaaatgtagctgggttgagattaatttcgttctgttttctcatgacagaaatcaggtttccctttccccacccctaagtgcctaacttaggtctgaaacagcctgtttattagtctgactctctcaaccataaaacataagctttatttaattctgcctttaaacacactcaggtttccccttaattttcatattattttctgcaagttttcttgagtatcttcaattcgttgaatgtggtttttggtttttttttgttttaacactagtcttcccttaattcattgctaactcaagccatccttactattaaacccaaatcagtcctttaagttcattatggcctttctagtatttaaaaaaaaaaaaatcattttcatttttcttctgctacgtttcctgactactactgcatacttctctgatacaggttctgtttgtattttttatatcattctcattttctcatttgacatgatctatgtctatatatgatataggtccccttttgtctcaaaatttttaattatgtgacttcaaaaatcacctgtatctgtagtagggcttccaaatctgcttctccatatgtgaccagtcacctgtctgctttcacatttagctagtgaactacacatttactaaaatgtgtaaattttacacatttagtgactgtgtaaaataaaaaaaaagttattttatcatatcctttctattatgttcccatcctgtcctcatgtcccatttactttattatcaccattcatttcttcaaaattatcttttagatacgctcatacaaaaatcaatccttgttttcttgcttgtgtcttttaaccttggaaaattacatcgtgtaaattaaacagatttttctgatgatctgtgcttcttatatactattagagtgcatgatagtatctcctgaaaaggatggaaagtagaagcatttgcttttagtcacttaattttgaatcttttttcttcatcttttgaattaattttttttattatatctacttttagtggagtttgagtcagaaaaaaacaagaatttgaaacaagtaaaaagatagaagagaaataaagatggtatgtgactactttcagagagagttaagtaactgtcagaataagcctggaacaaaacaggctgtaaattaataaaactacaaacacacattcaggtgaagcagaagtatagccataaaacatctagaaagagtgaatgaggcttttagcttttcttaggtcaatgtccagtgtgcttttttccatgggaataggataggtattaatacgcttttctaaactgctctcagaccttatccagaggacatggtaaagatatgttacagaaatttttctgatacttcctggaataactttaagttacaccctagtagactggtcattctaataaaatccagtactataacaaacctctgtatgttgatagcacattggccctttttagagttctttcctatgtttttcttacgtgatttcccacagttccatgagtccaacaaaggagagtgataggctccttatcttttagaagaggaaggaaaggcatgaagaagttgagggactggctgaagatcacgtacttactaagtagtacaactggagcaagatcaagtatctctgtctcccatatctgtgttctatcatttaaaatatatattggaaatccctgctgactcagattggtatgattaaaaatgagaggaaagttcaaatagttagtagtgacaaactaatactgctggactaagattttggtagcattgttttctaaaatattttaaatggagaatgaacacttataaaatgctttggaacataatctttagcttaattttctgttaaaatttagtaccccttcatcattccaataaagataagactgatccattgtctaaggaaattatttataaataatagagattaatttatttgagatttgaaataagaatagtatgaaaatattagataccacataaattgtttgaaattactgaataaccatcttaagtatggaacatttaaatggctatattttatttgtgtacagtttttctgtgccttgttaggccagtgaagcaattattttctctaagaaaatgacaataaaatataacacacttcagattgtctgatttacagtttggaaaggacaccgcaatgttcaaataggtaggagaccatcaaaaacacaattaaagtaacatattaggagacttgaaacttcagcctaataaatccttcatggttcttagccttattattgtgatataattctagatattttcttggagggcatgtgcccaactctcccgcaccccattttgtttgtcttttaaagttcttagaataaacagttctttatataataattatattttatttaagaaaatagtttgttaggtactttttaaaagatgtaaatttttaaatttacaaatacatatgggtctttgataagcaataggaattgaattacaagttactagggttataagcaaaaggttgcttaccataatgtcattaggtcacgatttttagctcacatctggaagcagcaactacttggctcaagtacatataagagtaattagttttattctctcttttttataaaatcgggtttcagatgagatgtttatcttagactattttagggaaaaattttacatgtttgagatggtggagtaaaaagactgttaaacatttcttttaaaaaattatttttacattacaacaatatatttatgatgtgttcagatcaaaaatttaacttctgtgtcccagatctactttcaaagtgagattttcacttgtcagcttaaatttctgactagaactaacatttgtgtatttttgtgcttagtcggaatacaaatttcacagtggatttttgaagtttgtccttaaattggataaaatcaagtgattaaagttactaaagagataaaaatggtaatttccatttttaaaagtaatttggttgtgtttatagttatttgtacaagtatttatcacagactctaaattgaaaaatgtagtatgatctatatttgaccctaaaaatgttggattaatttaacaaatatggcagatttttcataactaagtcttaagtcttctaaaaggaagctgttacccttctgtttttaattacattaattgaaatgtgttttaagagatacaatttcagcatattttatatattaaaaaacaaaaaaggattagtattgagccagtggccaaaaggtaatattactaccatgtagactgttatagttcaaattgtcccacttcacccagaattttagaaactagaagtctgggaggtactatatcagctgtagttgggtaattccaagtgctgatagtactattcatcttttttattattgtgtcagatgaaacaaatgccaagttgcaaaatatgcagatttttattatataatggttttaggcataaattattaacaagccatgccttatgtgtttcatcttatatttttctttagaactaaactataacagattttggaaaatgatttgacgtgcttgctcacttgattgacttggtcagatatttgaatgatggtattacctagattctaatccttgattctagttatataataaataatatagaatatgaaaatatgtttgggcatttactgtttatattatgtagtagcctccatcatgacacacttactacatttatgaattgagcagttctgtaattgtaattattattgctgttcatgtaacaaaacatgcttataatagcaaacaaatagaaatgcccccaaaatgctatttttttaattcagttataactgttactcttgtagttgtgtatgacgcaataaaatttgtaaaaaaatttcagcatgaaaaataaaatttgtatcacttatgta

SEQ ID NO: 168 - DNA, 4726 bp, HOMO SAPIENS
agcggctccgaggggggcgggtccgggaggctgtgcgtgtcttgtgagagctcttgaaccaagtcagcgctggagtcggctaggcggctggaaacggcggctgccgccggtgactcagggaggcgggaggcgggggaggagctcttcctgcaggcgtggaaaccatggtgctcacgctcggagaaagttggccggtattggtggggaggaggtttctcagtctgtccgcagccgacggcagcgatggcagccacgacagctgggacgtggagcgcgtcgccgagtggccctggctctccgggaccattcgagctgtttcccacaccgacgttaccaagaaggatctgaaggtgtgtgtggaatttgatggggaatcttggaggaaaagaagatggatagaagtctacagccttctaaggagagcatttttagtagaacataatttggttttagctgaacgaaagtcacctgaaatttctgaacgaattgtacagtggcctgcaataacgtacaaacctctgttggacaaagctggtttgggatccataacttctgttcgctttctgggagatcaacaaagagtatttctttctaaagaccttttgaagcctatacaggatgtaaacagtcttcgactttctcttacggataatcagattgtcagtaaagaatttcaagctttgattgtgaagcatttagatgaaagccatcttttaaaaggtgacaaaaacttagttggttcagaagtaaaaatttatagcttggacccatctactcagtggttttcagcaaccgttgtaaatggaaacccagcatcaaaaactcttcaagtcaactgtgaggagattccagcactgaaaattgttgatccgtcactgattcatgttgaagttgtacacgataaccttgtgacatgtggtaattctgcaagaattggagctgtaaaacgcaagtcttctgagaataatggaaccctggtttccaaacaagcaaaatcttgctctgaggcctctcccagtatgtgtcctgtgcagtctgtacctacaacagtttttaaggagatactgcttggctgtactgcagcaactccacctagtaaggacccaagacagcaaagtactccccaggctgccaactctccacctaaccttggagcaaaaattcctcaaggatgtcataaacaaagtttaccagaggaaatttcttcctgtctaaatacaaagtctgaagctctgagaacaaaaccagatgtctgcaaagcagggttgctctcaaagtcctctcagattggaactggagacttgaaaattctgactgagccaaaaggcagctgtactcagcctaagacaaacactgatcaggaaaacagattggagtctgttccacaagcattgactggccttcctaaggagtgcttacctacaaaggcttcttctaaggcagaattggaaattgccaatcctcctgaactgcagaagcacctagaacatgcaccttccccatcggatgtttcaaatgcaccagaagtgaaagcaggtgtcaatagtgatagccctaataactgttcaggaaaaaaggtagaaccttcagctttagcttgccgatcacagaatttaaaggaatcttcagtaaaagtagataatgaaagctgttgttcaagaagcaacaataaaatccagaatgccccatccaggaagtcggttttgacagacccagctaaactcaaaaagctgcaacagagtggcgaggccttcgtacaggatgattcttgtgtgaacatcgtggcacagttgcctaaatgccgagagtgtcgcttggacagtctccgcaaggataaggagcaacagaaggactcacctgtgttttgccgcttctttcacttcaggaggttacaattcaacaaacatggtgtgttgcgggtagaaggcttcttaacaccaaacaagtatgacaatgaagcaattggcttgtggttacctttaaccaaaaacgttgtggggattgatttggacacagcaaagtacatcttggccaacattggagaccacttctgtcaaatggtgatttctgaaaaggaagctatgtcaactattgagccacacagacaggttgcttggaagcgagctgtcaaaggtgttcgagaaatgtgtgatgtgtgcgacaccaccatcttcaacctgcactgggtgtgtcctcggtgtgggtttggagtatgtgtggactgctaccggatgaagagaaagaattgccaacagggtgctgcttacaagactttctcttggctaaaatgtgtgaagagtcagatacatgaaccagagaacttaatgcccacacagatcattcctggaaaagcactctatgatgttggagacattgttcattctgtaagagcgaaatggggaataaaggcaaactgcccttgttcaaacaggcaattcaaactcttttcaaagccagcctcaaaggaagacctaaaacagacttctttagctggagaaaaaccgactcttggtgcagtgctccagcagaatccctcagtgttggagccagcagctgtgggtggggaagcagcctccaagccagccggcagcatgaagcctgcctgtccagccagcacatctcctctaaactggctggccgacctaaccagcgggaatgtcaacaaggaaaacaaggaaaaacaaccaacaatgccaattttaaagaatgaaatcaaatgccttccacccctcccacctttaagcaaatccagcacagtcctccatacgtttaacagcacaattttgacacccgtaagcaacaacaattctggtttcctccggaatctcttgaattcttctacaggaaagacagaaaatggactcaagaatacaccaaaaatccttgatgacatctttgcctctttggtgcaaaataagacgacttctgatttatctaagaggcctcaaggactaaccatcaagcccagcattctgggctttgacactcctcactattggctttgtgataatcgcttgctgtgcttgcaagaccccaacaataagagcaactggaatgtgtttagggagtgctggaaacaagggcagccagtgatggtgtctggagtgcatcataaattgaactctgaactttggaaacctgaatccttcaggaaagagtttggtgagcaggaagtagacctagttaattgtaggaccaatgaaatcatcacaggagccacagtaggagacttctgggatggatttgaagatgttccaaatcgtttgaaaaatgaaaaagaaccaatggtgttgaaacttaaggactggccaccaggagaagattttagagatatgatgccttccaggtttgatgatctgatggccaacattccactgcccgagtacacaaggcgagatggcaaactgaatttggcctctaggctgccaaactactttgttcggccagatctgggccccaagatgtataatgcttatggattaatcactcctgaagatcggaaatatggaacaacaaatcttcacttagatgtatctgatgcagctaatgtcatggtctatgtgggaattcccaaaggacagtgtgagcaagaagaagaagtccttaagaccatccaagatggagattctgacgaactcacaataaagcgatttattgaaggaaaagagaagccaggagcactgtggcacatatatgctgcaaaggacacggagaagataagggaatttcttaaaaaggtatcagaagagcaaggtcaagaaaacccagcagaccacgatcctattcatgatcaaagctggtatttagaccgatcattaagaaaacgtcttcatcaagagtatggagttcaaggctgggctattgtacagtttcttggggatgtggtgtttatcccggcaggagctccacatcaggttcataacttatatagctgcatcaaagtggctgaagattttgtttctccagagcatgttaaacactgcttctggcttactcaggaattccgatatctgtcacagactcataccaatcacgaagataaattacaggtgaagaatgttatctaccatgcagtgaaagatgcagttgctatgctgaaagccagtgaatccagttttggcaaaccttaatctccctgcacattggaaatgaattacaggcagctgttcaaactcttcaggcaggattcctgtggactttgagattcatgttacctcatcttcttttttaaactgtacccaacttgtgagggtactctgtctaatgtatatttctagtgtttacagacagtaaatgtgtatatgtagtaactatttacagaacatgcatccttaaactgtgacttctcacctagtgcagaacttttaccaggctgtaaaagcaaaacctcgtatcagctctggaacaatacctgcagttattcttcagctgtttggacaacttagattgggtttataactattaggaatcactgcacagtttatttgggttgtgttttgtgtctgagtcccctccctcatcccttagggtccagaagagcaatggaggaagtgacagctaatgttgcagttcttattgtatggcataggactggcattatatagcagaaatcaactactgtacaatttcttggggttaaccatctttagttaaatggaattttaatttaaatgacgctttgctaattttaagtgttaagcattttgcattaaaatattcatataat

SEQ ID NO: 169 - DNA, 1111 bp, HOMO SAPIENS
gcccagggctctcggatgcagggagcctgggcccaaacagcagcttccggagtcggaaggagctgaggaagaagactgactgaaggagcttgcgacttttccgcctcggcaaccggacccagcagcaagcaggacgggcggcgctctgctactggtcccgttaagccagagtagcccaagccctgaagtcactgctcatccggaatggaaatcccgccgaccaactacccagcctccagggcggccttggtggcacagaactacatcaactaccagcaggggaccccgcacagggtgtttgaggtgcagaaggtcaaacaagccagcatggaggatattccaggaagaggacataagtatcaccttaaatttgctgttgaagaaattatacaaaaacaagttaaggtgaactgcacagctgaagtactttacccttcaacgggacaagaaactgcaccagaagtcaacttcacatttgaaggagaaactggaaagaatccagatgaagaagacaacacattttatcaaagacttaagtccatgaaggaaccgctagaagcacaaaatattccagacaattttggaaatgtatctccagaaatgacgctcgttctacatttagcctgggttgcctgtggttatataatatggcaaaattctactgaagacacatggtataaaatggtaaaaattcaaactgtcaagcaagtgcaaagaaatgatgactttattgaattagactacaccattctacttcataatatagcatctcaggagattattccctggcaaatgcaagttctctggcatccacaatacggcactaaagtaaaacataatagccgtctgccaaaggaagtacaactggaataaacaaaaaccctaacactggaagtgtaaacatgtctattgatgtgtatgccaatttcactggcatctagcttatgaggccaaataatcccaaagtgtcactttatataaatgtcttgattacagtatagaactttatagagtccataatacaaagtatcactacataaaaatgtctttaaaacagtaatagtggtatgtatatccaaaataaaaagcttcaatttcagcctcataatgt

SEQ ID NO: 170 - DNA, 4069 bp, HOMO SAPIENS
gcagatggtctaacggctggatagaggcatatttttagtttgaatttcctgcgcttacagaatggttttatctaatttgtagctactggggttctttattctctggggccacctgaaggctttcaaacacagtaataagccctcctcgggctgggaaacaggaagctgtgttttaaatgccgtgatcactggattaaaggaaacatggctccactctgttctcttgccaggtggaattatttttttctttatgatggttccaaggtaaaggaagaaggcgatccaacaagagctggcatttgttacttttatccttcccagaccctgctagaccaacaggagttgctttgtggacagattgctggagttgtccgctgtgtttctgacatttctgactctcctcctactcttgttcgtctgagaaaactgaagtttgccataaaagttgatggagattacctttgggtgctgggctgtgctgtggagctccctgatgtcagctgcaagcggtttctggatcagctagttggattctttaatttttacaatggacctgtttccctagcttatgagaactgttctcaggaagaactgagcacggagtgggacaccttcatcgagcaaattctgaaaaacaccagtgatctgcataagattttcaattccctctggaacttggaccaaactaaagtggagcccctgttgttgctgaaggcagcccgcattctgcagacctgccagcgctcgcctcacattctcgctggctgcatcctctataaaggactgattgtcagcacccaactcccgccctccctcaccgccaaggtcctgcttcaccgaacagcacctcaggagcagagactccctacgggagaggatgccccgcaggaacatggagcggcattgcccccgaatgtccagattatccctgtttttgtgaccaaagaggaagccattagtctccacgagttcccggtggaacagatgacaaggtctctagcatctccagcaggactccaggatggttcagcccagcaccatccaaagggtgggagcacatctgccctgaaagaaaacgccactggccatgtggaatccatggcctggaccaccccagatcccacatcccctgacgaagcttgtccagatggcaggaaggagaacggatgcttgtctggccatgatctggagagcatcaggcccgcaggactgcacaactctgccaggggtgaggttcttggcctcagctcctccctggggaaggaactagtctttctccaagaagaactcgacttgtctgaaatccacattccagaggctcaggaagtggaaatggcctcaggtcattttgccttcctacatgtgcctgttccagatggcagggctccttactgcaaggcatctctcagcgcctccagcagcctggaacccacgcctcctgaggacacagccatcagcagcttgcgccctccctctgctcctgagatgctgacccagcatggagcccaagagcagctcgaagaccatcctggccatagcagccaagcccccattcccagagcagaccctctccccagaaggacccgcaggcccttgttattgcctcgcttagatccaggacagagaggaaacaagcttcccacgggggaacaaggcctggatgaggatgttgatggggtctgtgaaagccacgcagcccctggtctggaatgcagttcaggctcagcaaactgtcagggtgctggcccctctgcagatggaatcagctccaggctgacaccagcagagtcctgcatggggctcgtgaggatgaatctctacactcactgcgtcaaagggctggtgctgtccctgctggctgaggagccgctgctgggagacagcgcagccatagaggaagtgtaccacagcagcctggcttcactgaatgggctggaagtccacctgaaagagacgctgcccagggatgaggcagcctccacgagcagcacctacaacttcacacattacgaccgcattcagagcttgctgatggcaaacctgccgcaggtggccaccccgcaggatcgccgcttcctccaggccgtcagcctgatgcatagcgaatttgcccagctgcccgcgctttatgaaatgactgtcagaaatgcctccacggctgtgtacgcctgttgcaaccccatccaggagacatatttccagcagctggcacctgcagcacggagctccggcttcccaaaccctcaggatggcgccttcagcctctccggcaaagcaaagcagaagctgctgaagcacggggtgaacttgctctgaactgcacccaggaggtgactgggaaggagaaaaccagcaaaggaagctctgccttttataattgaaaaggcccctctattttatttttcttgaaaacattcccttttttaggaaccaaatgatatttgagtttttgttattccttttgcagattgggatgtgttttgggggcaggggttagttcttcaggtcggcagacccagagcacttgataaagaactgtatttaatcggtagtgttggggccgggacgggcttggctccctctctgccatactgagcctgaggtatttcatatctcctgctgttccatcccagcttgaattggtgccacaagcttccaagttggcattttttctagaacctgatcgtccactagcccagagtgtgtgtgttcaacccccacaccaggtggtggtaggcggtgtgactgcacagcgaggtgccggatctgtgagcaggccgactccactcccacgccgcaggtaggtttctccagtgcgctcttgctgggaggtccggatcgttcctgcagggaagcggcagcacacggagaccacttggttgaattctgttggaactctactcaaatctaggggcgtcttctttggacccacaatgggggcaagccttaataatatggaagggagtttgggctttagagatccctttataaaagctctgggggctgagccctgagaattcagtgacaacaggaccaacctgcgctgcctttgactacaagtgggccgtgcagctggttcctctcgagcgagtgtccctaaataggagtttacaagatgtctgggggtaaaagcactgtgcttttcagtggtggctgcgtgaaagggagcgacactcagctgtgtgttcctgggcttgtgtggtacttagaacctcagttctattacgttatagtcagacatttttttgacagtatgagacagactgcaggatgaaaatatttgtcaaaatcttaactgaatgtttactggaagtacttgagattccatttgagagttgtattgttaataatttcatgtcagtgaactgatatctgatgtttatgatatggtgtctttttcttgaaacaagcttccaagggctagaaataaaatagccaaaaaatgctggagttctgagtaattaaatggcagcatttttttgtgacaaaggtaagggttaagacagtgtgtgtgtgtgtgtgtgtgtgtgtgtgtgtgtgtgtgcgcgcgcgcgcgcgcgcgtaacgtgggcgcatccctcttttccttccctgggttcagtgtggctgggtaaggaccgtctgtttgtagggctgccaggctgcagcctgctgctccagggagcaccagctgcagctgatccaatacaccaagcctgtgtctccctcttctatcacctctctccaggatctctgctgtctcttggatcccatctgcctagatggaagaggatcctatccgaagctaggataaatgttgtcttactcctctgctatgttctcccagaaaaaattgattacaagttctctgctgtggttgctgcagctccaggaagtccccgcaatgtctcacgttgtctttgaccagtggtccccagtaccaggccagcgaagacaactttataatgtcatttgtgttgtgaaaattcttccactgacccaaaatggaaccgtacaaagcctatccgtgtatatggaaaagtctcatgcacctggattaactcagaaaaagtaaagtcctgaaacttca

SEQ ID NO: 171 - DNA, 2623 bp, HOMO SAPIENS
tgccctgcccagggcgagggcagagcgggcccgcccaggtgcgcccgggggttgggccggagtccggaaggtgcgccgcgccgccccgaacctgtcccctaggcctccccccgcgtgaaagtgaaagtgtcggacccgcggaggtcaaggataggggggcggggccagcgcggagctgggagcgggagccgggcactccaggggccatggatgggctcggccgccgccttcgagccagcctgagactgaagcgcggccatgggggaccaccccaggacaattcaggggaagctttaaaggaaccagaaagggcccaggagcactctttgcccaactttgctggggggcagcacttctttgaataccttcttgtggtttctctcaaaaagaagcgttcagaggatgattacgagcctataatcacctaccaatttcccaagcgggagaacctgcttcggggtcagcaggaggaggaggagcggctgctcaaagctatccccttgttctgcttcccagatgggaatgagtgggcatcactcaccgagtatcccagggagaccttctccttcgttctgaccaatgtggatgggagcagaaagattggatactgcaggcgcctcttgcctgccggccctggccctcgccttcccaaagtgtactgcatcatcagctgcatcggctgcttcggcttgttctccaagatcctggatgaagtggagaagagacatcagatctccatggctgtcatctacccgttcatgcagggcctccgagaggcagccttccctgctcctgggaagactgtcactctcaagagcttcatccccgactcaggcactgagttcatttcactgacacggcccctggactcccacctagaacatgtggattttagttctctattgcactgtctcagttttgaacagatacttcagatctttgcctctgccgtgctggagagaaaaatcatcttcctggcggaaggtctcagcaccttgtctcagtgcatccatgctgctgccgcactgctctaccccttcagctgggcgcacacctacatccctgttgtccctgagagccttctggccaccgtctgctgccccacccccttcatggttggagtacaaatgcgcttccagcaggaggtcatggacagccctatggaagaggtcctgctggtcaatctttgtgaaggaaccttcttaatgtcggttggtgatgaaaaagacatcctgccaccgaagcttcaggatgacatcttagactctcttggtcaggggatcaatgagttaaagactgcagaacaaatcaacgagcatgtttcaggcccctttgtgcagttctttgtcaagattgtgggccattatgcttcctatatcaagcgggaggcaaatgggcaaggccacttccaagaaagatccttctgtaaggctctgacctccaagaccaaccgccgatttgtgaagaagtttgtgaagacacagctcttctcacttttcatccaggaagccgagaagagcaagaatcctcctgcaggctatttccaacagaaaatacttgaatatgaggaacagaagaaacagaagaaaccaagggaaaaaactgtgaaataagagctgtggtgaataagaatgactagagctacacaccatttctggacttcagcccctgccagtgtggcaggatcagcaaaactgtcagctcccaaaatccatatcctcactctgagtcttggtatccaggtattgcttcaaactggtgtctgagatttggatccctggtattgatttctcaggactttggagggctctgacaccatgctcacagaactgggctcagagctccattttttgcagaggtgacacaggtaggaaacagtagtacatgtgttgtagacacttggttagaagctgctgcaactgccctctcccatcattataacatcttcaacacagaacacactttgtggtcgaaaggctcagcctctctacatgaagtctgtggacatgtaaggacgagagtaaagaggaaaatcttatttttatatgtgtctttggcttttactatgggtaaaagtattttcctcgtggaaaataaggcaatgaatatgacaatcaagtggactacaagtggaagacctggccatggggatatgtttggagtgatagaatcatggggggcagcagctctacttcttctaaccggaagggtaagagatactggtaaaagcagcagcagcactggacacagggcatctaagtccttggtttggagtcaggtgtgctttccagaatcctgggaggagaggctgctcactgaagggaagcagcttcagtctagagtaatttgaggataggaatttcagtcaacagcagcctgtgaagaacactacatggcttccatacgtaggtctgtttccccatcactttcagtttgcactagtcctttaccttcagtcttggacatcctacctccaactgatctttattttgagcagcacagtccaattctttaactaaaggtgaagggatcgctgcactgacgttcttcccctctctcctcccttgatacctctactgatactttctactcaagcattgggaagcttttttagaagaatctt

SEQ ID NO: 172 - DNA, 6274 bp, HOMO SAPIENS
ggctggacggagctggcaggaggggccttgccagcttccgccgccgcgtcgtttcaggacccggacggcggattcgcgctgcctccgccgccgcggggcagccggggggcagggagcccagcgaggggcgcgcgtgggcgcggccatgggactgcgccggatccggtgacagcagggagccaagcggcccgggccctgagcgcgtcttctccggggggcctcgccctcctgctcgcggggccggggctcctgctccggttgctggcgctgttgctggctgtggcggcggccaggatcatgtcgggtcgccgctgcgccggcgggggagcggcctgcgcgagcgccgcggccgaggccgtggagccggccgcccgagagctgttcgaggcgtgccgcaacggggacgtggaacgagtcaagaggctggtgacgcctgagaaggtgaacagccgcgacacggcgggcaggaaatccaccccgctgcacttcgccgcaggttttgggcggaaagacgtagttgaatatttgcttcagaatggtgcaaatgtccaagcacgtgatgatgggggccttattcctcttcataatgcatgctcttttggtcatgctgaagtagtcaatctccttttgcgacatggtgcagaccccaatgctcgagataattggaattatactcctctccatgaagctgcaattaaaggaaagattgatgtttgcattgtgctgttacagcatggagctgagccaaccatccgaaatacagatggaaggacagcattggatttagcagatccatctgccaaagcagtgcttactggtgaatataagaaagatgaactcttagaaagtgccaggagtggcaatgaagaaaaaatgatggctctactcacaccattaaatgtcaactgccacgcaagtgatggcagaaagtcaactccattacatttggcagcaggatataacagagtaaagattgtacagctgttactgcaacatggagctgatgtccatgctaaagataaaggtgatctggtaccattacacaatgcctgttcttatggtcattatgaagtaactgaacttttggtcaagcatggtgcctgtgtaaatgcaatggacttgtggcaattcactcctcttcatgaggcagcttctaagaacagggttgaagtatgttctcttctcttaagttatggtgcagacccaacactgctcaattgtcacaataaaagtgctatagacttggctcccacaccacagttaaaagaaagattagcatatgaatttaaaggccactcgttgctgcaagctgcacgagaagctgatgttactcgaatcaaaaaacatctctctctggaaatggtgaatttcaagcatcctcaaacacatgaaacagcattgcattgtgctgctgcatctccatatcccaaaagaaagcaaatatgtgaactgttgctaagaaaaggagcaaacatcaatgaaaagactaaagaattcttgactcctctgcacgtggcatctgagaaagctcataatgatgttgttgaagtagtggtgaaacatgaagcaaaggttaatgctctggataatcttggtcagacttctctacacagagctgcatattgtggtcatctacaaacctgccgcctactcctgagctatgggtgtgatcctaacattatatcccttcagggctttactgctttacagatgggaaatgaaaatgtacagcaactcctccaagagggtatctcattaggtaattcagaggcagacagacaattgctggaagctgcaaaggctggagatgtcgaaactgtaaaaaaactgtgtactgttcagagtgtcaactgcagagacattgaagggcgtcagtctacaccacttcattttgcagctgggtataacagagtgtccgtggtggaatatctgctacagcatggagctgatgtgcatgctaaagataaaggaggccttgtacctttgcacaatgcatgttcttatggacattatgaagttgcagaacttcttgttaaacatggagcagtagttaatgtagctgatttatggaaatttacacctttacatgaagcagcagcaaaaggaaaatatgaaatttgcaaacttctgctccagcatggtgcagaccctacaaaaaaaaacagggatggaaatactcctttggatcttgttaaagatggagatacagatattcaagatctgcttaggggagatgcagctttgctagatgctgccaagaagggttgtttagccagagtgaagaagttgtcttctcctgataatgtaaattgccgcgatacccaaggcagacattcaacacctttacatttagcagctggttataataatttagaagttgcagagtatttgttacaacacggagctgatgtgaatgcccaagacaaaggaggacttattcctttacataatgcagcatcttacgggcatgtagatgtagcagctctactaataaagtataatgcatgtgtcaatgccacggacaaatgggctttcacacctttgcacgaagcagcccaaaagggacgaacacagctttgtgctttgttgctagcccatggagctgacccgactcttaaaaatcaggaaggacaaacacctttagatttagtttcagcggatgatgtcagcgctcttctgacagcagccatgcccccatctgctctgccctcttgttacaagcctcaagtgctcaatggtgtgagaagcccaggagccactgcagatgctctctcttcaggtccatctagcccatcaagcctttctgcagccagcagtcttgacaacttatctgggagtttttcagaactgtcttcagtagttagttcaagtggaacagagggtgcttccagtttggagaaaaaggaggttccaggagtagattttagcataactcaattcgtaaggaatcttggacttgagcacctaatggatatatttgagagagaacagatcactttggatgtattagttgagatggggcacaaggagctgaaggagattggaatcaatgcttatggacataggcacaaactaattaaaggagtcgagagacttatctccggacaacaaggtcttaacccatatttaactttgaacacctctggtagtggaacaattcttatagatctgtctcctgatgataaagagtttcagtctgtggaggaagagatgcaaagtacagttcgagagcacagagatggaggtcatgcaggtggaatcttcaacagatacaatattctcaagattcagaaggtttgtaacaagaaactatgggaaagatacactcaccggagaaaagaagtttctgaagaaaaccacaaccatgccaatgaacgaatgctatttcatgggtctccttttgtgaatgcaattatccacaaaggctttgatgaaaggcatgcgtacataggtggtatgtttggagctggcatttattttgctgaaaactcttccaaaagcaatcaatatgtatatggaattggaggaggtactgggtgtccagttcacaaagacagatcttgttacatttgccacaggcagctgctcttttgccgggtaaccttgggaaagtctttcctgcagttcagtgcaatgaaaatggcacattctcctccaggtcatcactcagtcactggtaggcccagtgtaaatggcctagcattagctgaatatgttatttacagaggagaacaggcttatcctgagtatttaattacttaccagattatgaggcctgaaggtatggtcgatggataaatagttattttaagaaactaattccactgaacctaaaatcatcaaagcagcagtggcctctacgttttactcctttgctgaaaaaaaatcatcttgcccacaggcctgtggcaaaaggataaaaatgtgaacgaagtttaacattctgacttgataaagctttaataatgtacagtgttttctaaatatttcctgttttttcagcactttaacagatgccattccaggttaaactgggttgtctgtactaaattataaacagagttaacttgaaccttttatatgttatgcattgattctaacaaactgtaatgccctcaacagaactaattttactaatacaatactgtgttctttaaaacacagcatttacactgaatacaatttcatttgtaaaactgtaaataagagcttttgtactagcccagtatttatttacattgctttgtaatataaatctgttttagaactgcagcggtttacaaaattttttcatatgtattgttcatctatacttcatcttacatcgtcatgattgagtgatctttacatttgattccagaggctatgttcagttgttagttgggaaagattgagttatcagatttaatttgccgatgggagcctttatctgtcattagaaatctttctcatttaagaacttatgaatatgctgaagatttaatttgtgatacctttgtatgtatgagacacattccaaagagctctaactatgataggtcctgattactaaagaagcttctttactggcctcaatttctagctttcatgttggaaaattttctgcagtccttctgtgaaaattagagcaaagtgctcctgttttttagagaaactaaatcttgctgttgaacaattattgtgttcttttcatggaacataagtaggatgttacatttccagggtgggaagggtaatcctaaatcatttcccaatctattctaattaccttaaatctaaaggggaaaaaaaaaatcacaaacaggactgggtagttttttatcctaagtatattttttcctgttctttttacttggttttattgctgtatttatagccaatctatacatcatgggtaaacttaacccagaactataaaatgtagttgtctcagtcccctccaggcctcctgaatgggcaagtgcagtgaaacaggtgcttcttgctcctgggttttctctccatgatgttatgcccaattggaaatatgctgtcagtttgtgcaccatatggtgaccacgcctgtgctcagtttggcagctatagaaggaaatgctgtcccataaaatgccattcctattttctaatataaaactcttttccaggaagcatgcttaagcatcttgttacagagacatacatccattatggcttggcaatctcttttatttgttgactctagctcccttcaaagtcgaggaaagatctttactcacttaatgaggacattccccatcactgtctgtaccagttcacctttattttacgttttattcagtctgtaaattaactggccctttgcagtaacttgtacataaagtgctagaaaatcatgttccttgtcctgagtaagagttaatcagagtaaatgcatttctggagttgtttctgtgatgtaaattatgatcattatttaagaagtcaaatcctgatcttgaagtgctttttatacagctctctaataattacaaatatccgaaagtcatttcttggaacacaagtggagtatgccaaattttatatgaatttttcagattatctaagcttccaggttttataattagaagataatgagagaattaatggggtttatatttacattatctctcaactatgtagcccatattactcaccctatgagtgaatctggaattgcttttcatgtgaaatcattgtggtctatgagtttacaatactgcaaactgtgttattttatctaatccattgcttaatgagtgtgtttttccatgaatgaatataccgtggttcatatgttagcatggcagcattttcagatagctttttgtttgttgggaagttggggttttggggggagggggagtattagtacgttgcatgaaatagcttactttataatgatggaattgctttttcttttgtcttgtgatttttttttttgaagtgaaatttaactttttgtgcaagtagtactattatacccatcttcagtgtcttacttgtactgtatcacattccataccctcatttaattcttaataaaactgttcacttgtttttctgggtagcatggtaattactggaatagtataaatgtgttgaatggtctttgagaaaatgaattaagattacaataaaccacaattgcaggaaaacaatgtagttctgagtctaatagtgataaagaatgcagtttgaagtttgaaatattgaatattgtagctgtacttgctcattaaaatgaaagtagctgtga

SEQ ID NO: 173 - DNA, 3033 bp, HOMO SAPIENS
gagcgaacatggcagcagaatgaggaggctggcgccgggtcgtggccgccgctgccgcgctgcagctcgggatcccagtccggcgcgctccgggccgcatccttagccggcctcctggcggccgcgggattatttcattcccaacggagagctagggagaaaggagactcccccgcggagcggttccgtgctctggcagggtgtagacgtttgtctgtgcgattcgccggctgcgcaaacgacgcgggagagagccggtcccgggctgcggcggcgcggccgcggggatgagccggccatggagcggccttggcggggcgcacgcagcggactggcgctgccgcgggagcgcagcctgagccggggctccagggggcttcgaagcctccggcgccctgggggggtccctgccgccgactccgggaaggacgcgagccccgcgtggcggacactgccgcagtcaccgttctgaggcgccccgagcttgctccgcctgcagctcggtgcgctctgggcacccgggcgccttgcccggtgcacggcggctggcgcaccgcggctagattggctacaggagcggggtgcaggactggctagaggtgggtgtgtgcgcgcgttggactggagatccgagcagaagcagaaccaggcggctctgagcagccatgcttcccggggtgggcgtgttcggcaccagcctcacggcccgtgtcatcatcccgctgctgaaagacgagggcttcgcggtgaaggcgctgtggggccgcacgcaggaagaagcggaggagctggccaaggagatgagtgtccccttctacactagccgcattgatgaggtgctgctgcatcaggacgtggacttggtgtgcattaacctgccgccgcccctcaccagacagatcgctgtcaaaaccctaggcatcggcaagaacgtcatctgcgaccgcacggccacgccgctggacgctttccgcatgacctcggccgcccactactaccccaagctcatgagcatcatgggcaacgtgctgcgcttcctgccggctttcgtgcgcatgaagcagctgatcgaggagggctacgtgggcgagccgctggtgtgtgaggtgcaggtgcacggcggcagcctgctgggcaagaagtacaactggagctgcgacgacttgatgggcggcggcggcctgcactccgtgggcacctacatcatcgacctgctcaccttcctcaccggccaaaaggccgtcaaggtccacgggctgctcaagaccttcgtgaagcagactgaccacatcaagggcatccgacagatcaccagcgatgacttctgcaccttccagatggtgctggagggcggggtgtgctgcaccgtcaccctcaacttcaacgtgcccggcgagttcaagcaggatgtcactgtggtgggctcagccgggcgcctgctggccgtgggcaccgacctgtacgggcagcgcaacagcgccccggagcaggagctgctggtgcaggacgccacgccggtgagcaactccctgcttccggagaaggccttcagcgacatcccctcgccctacctgcgcggcaccatcaagatgatgcaggcggtgcgccaggccttccaggaccaggacgaccggcgcacgtgggatgggcggcccctcaccatggccgccaccttcgacgactgcctgtatgccttgtgcgtggtggacaccatcaagaggtccagccagacgggcgagtggcagaacattgccatcatgaccgaggagccggagctgagccccgcctacctgatcagcgaggccatgcgccgcagcaggatgtccctctactgttagcacagattgagaacctcggggacttgagccttctgcaggggatgtccacagagagggaagggccgaggggagagggtgaccatggggaatgtggggatcagggaggtggagggacagtgtgaataaatggcatctaggaaggtaaactccaatcccggtgaccgaccccaaaccagactgttggtgggctgagctcctagcctggaagcattcaggagagcctgccattcctgggatgatccctgctgggtatttgcacgagagtggtttggtttagctgcctctgctgccctttactgtgacaagcaaggaggggttgcttccctccctacctcatccatcccacacaccttggccttctgcaagccaagtggttctgcaaggtcaaggcactagtatcagatggcaagctcagtgcccgggattcccactgctggcaggagaaggcccattttcacagtccacagaagcgtgttaggctggggctgggggtgggatgggctggtgagaaagttcaaattccaggaagccactttttattggatataaggtatctaacggcaaaagtacttagtagcaaagtggccaccttttgattgattgggcttcctcataggaagcactgagggtgtgtctttgtacttggttcattgcccttcacctggtagagaaagagaggtcagaaatagcaagcaaaaagcaggactcccaggagccacaagaaaagagcacaggctgcaccaaagcaggggcagcagagaataaaatatccctttgaacttgtcaacaattaaaaaactgcaaggagtcaccttataacactatttccagtaaaggtggaattgagtatcagagggattactgcggtgttaaggtagccctgccacgtggctctccaggcagggccaagaagacagcacaaagtatgggtttggccataagctcatatgctgcccccaaagactggggagagctgtgtgcctcagtgttgcagtgtgaattcctaaatagagggtaaagtgagcctagccaggaggtgtttggggctctatcgcgcatctctcctaccaagctgggcaagagcttttaggagattcatccagctttgtggatttagaaaggaagccttcagttccaatcagaatcctctttcctttaaaaaaaaaaaaaaaaaaaaaaaaaaaaaaaaaaaaaa

SEQ ID NO: 174 - DNA, 1314 bp, HOMO SAPIENS
agcactcaggtgtctcaggcccacggaggatttaatagatgaaaccctggatcgtctcgaagccgtggttgttaagaagtttaaatatattgaccggaaacggggagaaaccagagggtggaagagccgctcgcactgcggtgcgatccctgagggctcggggcaggggactggggaccgagcaggagctggcggggtgagctctgcgaagcgggcgtgagaccgagcgcccatgggccggtcacgccgggtgcccgctcaccccccgacgccagcaggagcgcgcgcgcatgccccgcgccgtgcgggggtggcggcgccggcagggggtactgcgcgccgggcatggaagtgcgtgaagagccgcaagtaggcggaagggtaaagccggggcagcagccggcggtccgggtgtaagcggcgtgtgcgtgtgcaagagccgctacccggtgtgcggcagcgacggcaccacctacccgagcggctgccagctgcgcgccgccagccagagggccgagagccgcggggagaaggccatcacccaggtcagcaagggcacctgcgagcaaggtccttccatagtgacgccccccaaggacatctggaatgtcactggtgcccaggtgtacttgagctgtgaggtcatcggaatcccgacacctgtcctcatctggaacaaggtaaaaaggggtcactatggagttcaaaggacagaactcctgcctggtgaccgggacaacctggccattcagacccggggtggcccagaaaagcatgaagtaactggctgggtgctggtatctcctctaagtaaggaagatgctggagaatatgagtgccatgcatccaattcccaaggacaggcttcagcatcagcaaaaattacagtggttgatgccttacatgaaataccagtgaaaaaaggtgaaggtgccgagctataaacctccagaatattattagtctgcatggttaaaatccaatccactaacactttagttatattcactggttttacacagagaaatacaaaataaagatcacacatcaagactatctacaaaaatttattatatatttacagaagaaaagcatgcatatcattaaacaaataaaatactttttatcacaacacagtacatatttgtcatttttaaaaagccacacaatagaaacaagacaccaagatatttaattatcttgttgactcctgtaaaatagctaaacactcatcattcgcggtgcaatactcatagacataagttcctgaaacaatagtttgcatgcgtaaggcattcgcaccaaagaaatctg

SEQ ID NO: 175 - DNA, 7166 bp, HOMO SAPIENS
gggaggagatccgctcacacacacgaggaggagggttgagctgccgccgccgccgcctctgtcgtcgtcgcgagtgtggagtcgggactggagctgctgccgcggcgacgccggggatctttgtcgctagctcccggcccttctgccccgccgccttccctcagtcagcgttgcccactcctctccggccgggcgcccctgcctccatttcccgctctctgtccaccacacacacggcccccccgatcatggatccgggcagtggcggcggcggcggcggcggcggcggcggcgggagcagcagcggcagcagcagcagcgactcggcgcctgactgctgggaccaggcggacatggaagcccccgggccgggcccttgcggcggcggcggctccctggcggcggcggccgaggcccagcgggagaacctcagcgcggccttcagccggcaactcaacgtcaacgccaagcccttcgtgcccaacgtccacgccgccgagttcgtgccgtccttcctgcggggcccggcagcgccgccacccccagctggcggcgccgccaataaccacggagccggcagcggcgcgggaggccgtgcggcacctgtggaatcctctcaagaggaacagtcattgtgtgaaggttcaaattcagctgttagcatggaactttcagaacctattgaaaatggagagacagaaatgtctccagaagaatcatgggagcacaaagaagaaataagtgaagcagagccagggggtggttccttgggagatggaaggccgccagaggaaagtgcccatgaaatgatggaggaggaagaggaaatcccaaaacctaagtctgtggttgcaccgccaggtgctcctaagaaagagcatgtaaatgtagtattcattgggcacgtagatgctggcaagtcaaccattggaggacaaataatgtatttgactggaatggttgacaaaaggacgcttgaaaagtatgaaagagaagctaaagagaaaaacagagaaacttggtacttgtcttgggccttagacacaaatcaggaagaacgagacaagggtaaaacagtagaagtgggtcgtgcctattttgaaaccgaaaagaagcatttcacaattctagatgcccctggccacaagagttttgtcccaaatatgattggtggtgcctctcaagctgatttggctgtgctggtaatctcagccaggaaaggagagtttgaaactggatttgaaaaaggaggacagacaagagaacatgcaatgttggcaaagacagcaggtgtaaaacacctaattgtgctaattaataagatggatgatccaacagtaaattggagcaatgagagatatgaagaatgtaaggagaaactagtgccatttttgaaaaaagttggcttcaatcccaaaaaggacattcactttatgccctgctcaggacttactggagcaaatctcaaagagcagtcggatttctgtccttggtacattggattaccgtttattccatatctggataatttgccgaacttcaatagatcagttgatggaccaatcaggctgccaattgtggataagtacaaggatatgggcactgtggtcctgggaaagctggaatcaggatctatttgtaaaggccagcagcttgtgatgatgccaaacaagcacaacgtggaagttcttggaatactttccgatgatgtagagactgataccgtagccccaggtgaaaacctcaaaatcagactgaaaggaattgaagaagaggagattcttccagggtttatactttgtgatcctaataatctttgtcattctggacgcacatttgatgcccagatagtgattatagagcacaaatccatcatctgcccaggctataatgcggtgctgcatattcatacctgtattgaggaggtggaaataacagccttaatctgcttggtagacaaaaaatcaggagaaaaaagtaagacccgaccccgttttgtcaaacaagatcaagtatgcattgctcgcttaaggacagcaggaaccatctgccttgagacctttaaagacttccctcagatgggtcgtttcaccttaagagatgagggtaagaccattgcaattggaaaagttctgaaactggttccagagaaagactaagcattttcttgatgaccctgcacaatactgtgaggaaaattgactgcagaagcctacttcacaccgccttctcttattttctgcccattgataaacctctccccatattttgcaaagaggaaattcacagcaaaagtccacattatgtcagctttctcatattgagagctctgctatgccactgttgaatttttcccaagattcctgtccctagccctcacttcaaactctgcttccttggacagatttggcaatagctttgtaagtgatgtggacataattgcctacaataatgaaaacctacaggaatttttttatttttcattttccccttaggcatatttagtatttttcccccaggcagatcattctgagtgtgcgagtgtgtgtgcacatgttacaaaggcaactaccatgttaataaaatattcaatttgaaatccttttcggtatttgaattgcttttgaataatgttttttatctggatgtaacattgttgcattagctttttaactttcccaagtaattgaatacattttattacttggacttttataaactctttccctacccactataaatgagacattcacagcgttcaagtttgtattaaaggaaaggattagtttgaccccttcttttgatggttaatgcatacatgcagttaaatccctttatgcaaatgtgacactgctttactaggtcttttagttatttatttattttttttttttttgccaatttatattgtaacatgatttcttgaacacagtaagttgttttaaaataaaagaacagcatactgtagtttttataagtaaagcgtaatgaaattgtacccctagagaaaattccattaacttgttaaattagtggaattaacaacaaataaagcatgtttgagacctggcaaaaattcctctggtagtatttataaatagagctgcatgcctctagtatgaaaaccgtatcagttgcaagtgccacttctacaagttactcagtttactctttgtatcagtaactttaaaggttggatgatccttgctggttaaagctaaatctcaacctagcaactaaatgaaaatatttagaatcatcagaatctgaacagactaaaattatcagcgataagcagaatcaagcagggtataagttttatctcaattatttgaaattgactgagttttcttaagtgtaaagctgaaatttgctaaccatgtttttgatgaaccacagtgcagcattgtgtgggttttagattgaatgactctctgctataattatcatgactttgaaatttttcatgagaataaatgaggaatggaggcaatttgtgggtttatccaaagcccccttgatgttgagtgttgccattgatcaaagatagcctcttttagattgtgatttctctctaaataagatactttgtatatttaatgacaagtctcttccctataattttgctcctcagaaaagaaaagcctagacagactgtatttccagtcacagaacataaaacttaatctaatgggtgttttgttttgttttgagacagaggctcactctgtcacctaggctggagtgcagtggctcgatctcagctcactgcagcctccacctcccggattcaagcaatttcctgcctcagcctcttgagtagctgggattacaggagccctccacgaggcccagttaatttttgtatctttagtggagacgaggtttccccctattggtcaggctggtctcaaacttctgacctcaagtgatccactcgcctcagcctctcaaaagtgctgggattacaggcatgaggcgccgcacttggcctagtgttttcttaactgtgaaattcccattcatttcttgaatgaggctacatcttatggacagagcaaagttattgtcctacagattcttaaaactataattatggctattgcatgaaatttaaatagattttattatgtctgcaaatctctgggcttttatttttctggaaaatataggagctttaatcaaaacataatagttctttttgtaattccatgttaataaaaacaaatactagcaattgcttgaattttaatgaatatttaaaagttcaagagccacggaaatcacttccagagataagagttccctttctaaatagaacacatttttaaaaaataagttatgtttgctactaaaacatttacactgttagactattatgtgcatgttgccaagactcttaagtaacttggatatcaactgtgaagggcctacctctaaaaagtaacaggtcatacaaatacaaatgtaactgtaaaaattccactggattcttgcatatttgcaagattagattattcaaaagaaatttcagtgctaaaattaaccagcaacataagttctatgggctttgaaaattgttctcatctttttaaagttgatgcattttcaatcctgcttacacaggctgttcatttggataagtaaataaaatgtctaaggtgaacttggcattatgtggagatgttggaccgttatagagcaatacaaattcctatgctgtcattctgttttctgcaaatgcaaacgtgcttatatggtcaacagtgcaaaaatagggtagttggctgcatatttagggtattacctaagcatttgttctctaacgttgctctactagaatgatttttttcttgcatcttttcacattaatgatgttctttatataactttcatgcgattatttagttttttaaattaataaagtgaatttaagaaatattgaaataaacatctaagtaattgccattttaaacccttgtttcttactgtgggagagggggaaatacagcactcatttcttgtttttaatttgcagaagtaagtgaaaatctatgtaaaatcaaaccaaaagagttggactgagtgtgtattgtcttgagattaagtgacaaatagtaaagtgttactgagtaattaagcccatgtattttttttttgtgagttgaaaatctttgaaatatgtgataaccgaatgtcaaaagttcctaaactctaacagtgcaggttgttcactgtaacgaggtaactcatatttgctggttacataaactacaagtactgctctcacaatatgggactttgaactgtgatgtagttcaacagttgccggcatcctctcagctgatacgctgcgaatattttgggttagacttgcagccagatgcagttttgcaacccaagaaaaaagttgaacctatgatcaaaaactgctcccaagatgaacctggaaaaaaatcagctaagctcccttggcgatctgcaggaacactagtaatgactggaattactccgtgatctttgatgactattacacataacagcactctagcaccttttcttactggcatggacttcctcatggactgctacttcatggatgatagcttcattgctttgggtagggatttaaggtagtcaaggggaaaatacgcagttttattacaggtcttaacatcaggcaactttcaactttaaaaccctttgtgaaaaatgtggttatagcactatagctctgattttaggatggttaaatgttatattcattgttggcttaccttatcaaactgtgccattaatcctttcacagacataggtaaggaagagaacaaccagtggattcaggggacaattatctatctccaaataataggcttttatttcttgcagctaactttttcagtgattctagcagatgccatctagtacatccttgatcttgtttctttcgtgagagatctcgccatggcagcatcttgttaagtaagtgtaattgcacatgcacaaaagacttaactagctttacatttagcagtcagttggttagattaggtttcatagtaaatgaataggaatagaaagaataggaagtgtttttattttccagtagtaattccgtggattccatttgacccagtttactatcagttcagttcaggtagatttggttcaacttttggtggtttttggctctaggatattcttgactttaatatcctagaacttactgagtcttcccttcaataaatacacttctcacatacctctaatcctatgcttccttgaaacaataatgctagctgagttgtttactaaggattattataagggcctgaaggtgtgggagtggagattaattaaaacctttatgttctccaatataagggaaaagcaggttggtactacttctgattaggcagaaaacaccaggattccttaagtgatccttgaaatggttattgttttctgccttgtcacatttgccactgtgccctttaaaacgatgtggaaacctcaggtttgtggacagcacaggtggaatgacatcttgtgcttcctgaggctcccctctaccaggcacattagcttagtgcttcagatgtcagcccaagtccttgttacctccttttcctgctgcccagggaagagtgtgtgtgctggagctggagcgcttgcactcttcaggtgactattctcacctccatttcctccacatgcattaggtgaaactgaggtctaagcctcctgcaaggtctacattttaaggactcacacatcaggctctcagaaatgtacacaggtattagttctgtttgttctaaaggaaatgtgggtatctctcaggccaggacttagtgactagttttcgctagacagcaggttaatacctagatctcatttaaaaaaaaaaaaaaaaaacaggattaaagggaactgatcaggtttgttgagttttttagcctaattccaaagcatggaagagtgctctaggtaggaaagaaagctttttcttacgatttgtagctacctactgtgcctgacttggtgcctgtgtgaggattaagcccttagtctgctcttgcaattattcaaatgacaaattaaatttgcttttgtaataacaataaaagttgtcatcttcccttttgaaaaaaaaaaaaaaaaaa

SEQ ID NO: 176 - DNA, 2248 bp, HOMO SAPIENS
ggcagccgcagaagcggcagcggcggcggcgcggcgcaggcaccggcccggggagaggcaccatgagcggatcacagaacaatgacaaaagacaatttctgctggagcgactgctggatgcagtgaaacagtgccagatccgctttggagggagaaaggagattgcctcggattccgacagcagggtcacctgtctgtgtgcccagtttgaagccgtcctgcagcatggcttgaagaggagtcgaggattggcactcacagcggcagcgatcaagcaggcagcgggctttgccagcaaaaccgaaacagagcccgtgttctggtactacgtgaaggaggtcctcaacaagcacgagctgcagcgcttctactccctgcgccacatcgcctcagacgtgggccggggtcgcgcctggctgcgctgtgccctcaacgaacactccctggagcgctacctgcacatgctcctggccgaccgctgcaggctgagcactttttatgaagactggtcttttgtgatggatgaagaaaggtccagtatgcttcctaccatggcagcaggtctgaactccatactctttgcgattaacatcgacaacaaggatttgaacgggcagagtaagtttgctcccaccgtttcagacctcttaaaggagtcaacgcagaacgtgacctccttgctgaaggagtccacgcaaggagtgagcagcctgttcagggagatcacagcctcctctgccgtctccatcctcatcaaacctgaacaggagaccgaccccttgcctgtcgtgtccaggaatgtcagtgctgatgccaaatgcaaaaaggagcggaagaagaaaaagaaagtgaccaacataatctcatttgatgatgaggaagatgagcagaactctggggacgtgtttaaaaagacacctggggcaggggagagctcagaggacaactccgaccgctcctctgtcaatatcatgtccgcctttgaaagccccttcgggcctaactccaatggaagtcagagcagcaactcatggaaaattgattccctgtctttgaacggggagtttgggtaccagaagcttgatgtgaaaagcatcgatgatgaagatgtggatgaaaacgaagatgacgtgtatggaaactcatcaggaaggaagcacaggggccactcggagtcgcccgagaagtaagtttgtgtgtaaggtggagtctcaccgtcccccaggctggagtgccgtggcgtgatctcagctcactgcaacctccacctcccgggttcaagctattctcctgcctcagcctcccgagtagctgggattacaggcacctgtcaccacacccagctaatttttgtatttttagtagagatggggtttcaccatattggccaggctggtctcaaactcctgacctcaagtgatctgcctgccttggcctcccaaattgctaggtttacaggcatgagccaccacgcccagccttcccttgcacttttaatgagggggttaagttcactgttttctctttctatggtattgggtaaaataggtctgcaagctttatatttgcccagggtatcattcattcttcaggtgttgatttaggagtgttatttggaaggagtattatttgctcttcccctgagaactgaaagaggggaaaggagtacatttgagggcacttaatacaaagttaatgtcagaatgtgtgccttgaaattcttgctttatacatacatctgtcattttcatttcacagggttcacagggtttcacagtctgatgagactgtgcctgttattgttttttatttttactctggattttccttgcatctgacttgccactagcacaggaagctcaggacgaaggcagcgttaggagaatagttgtggtatggtgacttctgtgtttatctgcaggggtgtgaatagccgtaacttgcctgcacctgctgccttaacagtggagttggccaggcgcagtggctcacacctgtaatcccagcactttgggacaccaaggtgggtggatcacctgaggtcaggagttctagaccagcctgaccaacatggtgaaaccccttctctacgtataaaaaaatacaaaattagccaggcatggtggtgcatgcctgtaactccagatacttgggatgctgaggcaggagaatcgcttgaatatgagaggcggagccaagatgatgccattgcactccagcctgggcaacaagagagaaggtccttctc

SEQ ID NO: 177 - DNA, 2212 bp, HOMO SAPIENS
actttgggtgtttagctttctctgcttggggcctgccactccgtcgccaatgctgtttgcttacaaatcactacccacctgctgctgggcttcgtgcctgagaagggtcctaacgaaggtctgttggtggagatgatcctccttatgtaactaaacgtagaggacgctcaggaggaggagggaggccgctcttgttattcatttaaaacggtgcctttgggcggaaactgaaaacacacctgcagcatctccggtggaaaggagcgaagaacacggactgggagcacaaagagaagtgctgtgcgcgctgccagcaggtgctggggttcctgctgcaccggggcgccgtgtgccggggctgcagccaccgcgtgtgtgcccagtgccgagtgttcctgagggggacccatgcctggaagtgcacggtgtgcttcgaggacaggaatgtcaaaataaaaactggagaatggttctatgaggaacgagccaagaaatttccaactggaggcaaacatgagacagttggagggcagctcttgcaatcttatcagaagctgagcaaaatttctgtggttcctcctactccacctcctgtcagcgagagccagtgcagccgcagtcctggcaggttacaggaatttggtcagtttagaggatttaataagtccgtggaaaatttgtttctgtctcttgctacccacgtgaaaaagctctccaaatcccagaatgatatgacttctgagaagcatcttctcgccacgggccccaggcagtgtgtgggacagacagagagacggagccagtctgacactgcggtcaacgtcaccaccaggaaggtcagtgcaccagatattctgaaacctctcaatcaagaggatcccaaatgctctactaaccctattttgaagcaacagaatctcccatccagtccggcacccagtaccatattctctggaggttttagacacggaagtttaattagcattgacagcacctgtacagagatgggcaattttgacaatgctaatgtcactggagaaatagaatttgccattcattattgcttcaaaacccattctttagaaatatgcatcaaggcctgtaagaaccttgcctatggagaagaaaagaagaaaaagtgcaatccgtatgtgaagacctacctgttgcccgacagatcctcccagggaaagcgcaagactggagtccaaaggaacaccgtggacccgacctttcaggagaccttgaagtatcaggtggcccctgcccagctggtgacccggcagctgcaggtctcggtgtggcatctgggcacgctggcccggagagtgtttcttggagaagtgatcattcctctggccacgtgggactttgaagacagcacaacacagtccttccgctggcatccgctccgggccaaggcggagaaatacgaagacagcgttcctcagagtaatggagagctacagtccgggctaagctggttctcccttcacggcccagaaaactccaagaggctcaagaagggacagatcagccatcacttcatggtcaactttgtttggtagtgctaggagccaagaatttacctgtgcggccagatggcaccttgaactcatttgttaagggctgtctcactctgccagaccaacaaaaactgagactgaagtcgccagtcctgaggaagcaggcttgcccccagtggaaacactcatttgtcttcagtggcgtaaccccagctcagctgaggcagtcgagcttggagttaactgtctgggatcaggccctctttggaatgaacgaccgcttgcttggaggaaccagacttggttcaaagggagacacagctgttggcggggatgcatgctcacaatcgaagctccagtggcagaaagtcctttccagccccaatctatggacagacatgactcttgtcctgcactgacatgaaggcctcaaggttccaggttgcagcaggcgtgaggcactgtgcgtctgcagaggggctacgaaccaggtgcagggtcccagctggagacccctttgaccttgagcagtctccatctgcggccctgtcccatggcttaaccgcctattggtatctgtgtatatttacgttaaacacaattatgttacctaagcctctggtgggttatctcctctttgagatgtagaaaatggccagattttaataaacgttgttacccatgtc

SEQ ID NO: 178 - DNA, 1142 bp, HOMO SAPIENS
acaccggaaggggtgggctttgcgaagatggcggcgctgggggtgctggagtccgacctgccaagtgccgtgacacttctgaaaaatctccaggagcaagtgatggctgtaactgcacaagtgaaatcactgacacaaaaagttcaagctggtgcctatcctacagaaaagggtctcagcttcttggaagtgaaagaccagctgctgctcatgtaccttatggatttgacccacctcattctggacaaagcctcaggaggatctcttcagggacatgatgcagttttgagactggtggagattcgcacggttttggaaaagcttcgtcccttggaccaaaagctgaagtatcaaattgacaagctgatcaagactgcagtgacaggcagccttagtgagaatgacccacttcgttttaagcctcatcccagcaatatgatgagcaagttgagctctgaggatgaggaggaagatgaagcagaagatgaccagtctgaggcttcagggaagaaatctgtgaagggagtgtctaagaaatatgttcctccacgcttggttccagtacattatgatgaaacagaagctgagcgggagaagaagcgtctagaacgagccaagagacgggcattgagcagctctgtcattcgtgaacttaaggagcagtactcagatgctccagaggaaatccgtgatgctcggcatccccatgttacccgccagagtcaggaggaccaacacaggattaactatgaggagagcatgatggtgcgtttgagcgtcagtaagcgagagaaaggacggcgaaaacgagcaaatgtcatgagctcacaacttcattcccttacacacttcagtgacatcagtgctttgacagggggaactgttcatcttgatgaggatcagaatcctattaagaagcggaagaagatacctcagaaaggtcggaagaaaaaaggttttcggaggcggcggtgattatgggtgtacatatttgtatattttttgtcatcctgagatacttctaatttcattgtatataggtggttttccctggaattcattaattgtttgctttggacatgtggaaagagccttactaataaaattgattttgcttatgaattaaagcccctttttgcaca

SEQ ID NO: 179 - DNA, 3059 bp, HOMO SAPIENS
ggttgtgctgtctgtgtacttccggcagcctccagacagtttcttccgcttcctgtaccacccggctcaagtagcggacacggaacagggaactatcagcccgtcggcctccgggccctgcattctctagccatggaccgggaccttttgcggcagtcgctaaattgccacgggtcgtctttgctctctctacttcggagcgaacagcaggacaatccacacttccgtagcctcctggggtcggccgccgagccagcccggggcccgccgccccagcacccgttgcagggcagaaaagagaagagagttgacaacatcgagatacagaaattcatctccaaaaaagcggatctgctttttgcactttcctggaaatcagatgcacctgcaacttctgaaattaatgaagacagtgaagatcattatgcaatcatgccacctttagagcaattcatggagatacctagtatggatcggagagagctgtttttccgagatattgagcgtggtgatatagtgattggaagaattagttctattcgggaattcggttttttcatggtgttgatctgtttaggaagtggtatcatgagagatatagcccacttagaaatcacagctctttgtcccttaagagatgtgccttctcacagtaaccatggggatcctttatcatattaccaaactggtgacatcattcgagctggaatcaaggatattgacagataccatgaaaagctagcagtatctctgtatagctcttctcttccaccacacctatctggtattaaattaggtgtaattagctctgaagagcttcctttatactacaggagaagtgttgagctaaatagcaattctttggagtcctatgaaaatgtcatgcagagttccttgggatttgttaatccaggagtagttgaattccttctagaaaaactaggaatagatgaatctaatccaccatctttaatgagaggcctacaaagcaaaaatttctctgaagatgattttgcttctgcattgagaaaaaaacaatccgcatcttgggctttaaaatgtgtgaagatcggagttgactattttaaagttggacgccatgtggatgctatgaatgaatacaataaagctttggaaatagacaaacaaaacgtggaagctttggtagctcgtggagcattatatgcgacaaaaggaagtttgaacaaagcaatagaagattttgagcttgcattagaaaactgtccaactcacagaaatgcaagaaaatacctctgccagacacttgtagagagaggaggacagttagaagaagaagaaaagtttttaaatgctgaaagttactataagaaagctttggctttggatgagacttttaaagatgcagaggatgctttgcagaaacttcataaatatatgcagaaatctttggaattaagagaaaaacaagctgaaaaggaagaaaagcagaaaacaaagaaaatagaaacaagtgcagaaaagttgcgtaagctcttaaaagaagagaagaggctaaagaagaaaagaagaaaatcaacttcttcttcaagtgtttcttctgctgatgaatcagtgtcttcatcatcatcctcttcctcttctggtcacaaaaggcataagaaacataagaggaaccgttcagagtcttctcgcagttccagaaggcattcatctagggcatcctcaaatcagatagatcagaataggaaagatgagtgctacccagttccagctaatacttcagcatcttttcttaaccataaacaagaagtggagaaactactggggaagcaggataggttacagtatgaaaagacacagataaaagagaaagatagatgccctctctcttcatcttcacttgaaataccggatgattttggaggtaggtctgaagatccaagagatttttataacagctataaaacccaagcaggtagtagcaaaacagaaaagccatataaatcagaaagacatttttccagtagaagaaattcctcagattccttctgtaggaattcagaggacaagatttatggttataggagatttgaaaaggatatagagggaagaaaagagcactatagaaggtgggaaccaggttctgtgaggcattctacctcaccagcaagctcagaatactcttggaagtcagttgagaaatacaaaaaatacgctcactctggatcacgtgatttcagtagacatgagcaaagataccgtttaaatacaaatcaaggagaatatgaaagagaggacaattatggggaggatatcaaaacagaggttccagaagaagatgcactaagtagcaaagaacactcagaaagcagtgttaagaaaaatttacctcagaatttactgaatatatttaatcagatagctgaatttgaaaaagaaaaaggaaataagtcaaaaaattaatacaccaaggatatcggcaccattacacaaaatgccattaagtgaagtttttggttgtattagtcataacagttgagtgcagaaatctctgcttctaaaattatttgtagagattacaggaaacaaatgcttttaagtaagtttttctcaaattttgtttcagttctaggtcccttgtcacagcttggtttttagactttttatgtatatgtttatgtacagtatattactcttgacagtttgaatttcttcacctaaagataattctctgaaagtactgtttcttcattctattgcggtatatgagaattcctgggtgcatcttattctgctgtttgagagaaaaatttgtgcattgaacacttggatcatttttataaaaattaatttcattttcttttctgttaaattaaaaatcgtcagcttttgaaagattatatgttcgaatgtttcttgaacacttttatatttatcagtttaaatattacattttttgcccaattttttttaaaatttttaaatggtagattatatgtcttaattttcctctaaagcccaatttgattaaaagtggtttgtgaacagtcaaaaaaaaaaaaaaaaaaaaaaaaaaa

SEQ ID NO: 180 - DNA, 14882 bp, HOMO SAPIENS
aacggttctaacagctgggtgcgggtggagctgcgggcgatcgccagctcgagtgcagattccttgctgtgaccgaggttcagagtgagctctgtcggtgtgtcagtttgcctcttcaggcactcttcaatgaaacctcatcagcagatcgggctctcttcccttgccttgcctcctaacccccctaggccaggtgagggggacagggtactgggaggtaagaaggaactcttctgcaaggagggctctcacgtctgtcttaggcctgctccttaccagagtctttggggaagcagtagggagggcctgagggtctcaggaaaggctctctgctggtctggctctgctctgtagctccatctatttccctgtcccaggtcctttcttcctcctaaccccattgactctgaccatcccctgcccagagcctgaggtcccttctctggcccctctgctgggctggcccatgcaggtgaggccccgcatctggcatcctggaactggcagttggagcctgagctatgggcaaggtcacttcgacagcagttgaatgcccagctcctcatggtcccggaggagaggagggtaggtttgtcttctgatgagacatcatctgattcccttaagtcttggcactccatatgtgtcttggacagcaaagaacagcccttggcctgccagcagaaacagaggcagttcgtgaagccagtgactgagtcagagcagcccacagtgctggaactcctgctagctgagctccgaactctgttctcagctgtgttgcaggacagtagccctgcagcttggcgctatcttcatgcagtactgggtctactgcctccatatcgtgagttgctagttggccaccttgatttgctgcccttcctggagcagctgtactgctgggcaccctgggtccaaacccacctccatctggacctgctaggtgccattgtccaggcctttcctccagacagctctttgttagacagtgcttcccatgctgactgctgtccccagaagcggaggctccatcacaggcccccatgcccagcttgcccttttgtgcaggcccagtggagcaggcagcaagtaaaggaggagctggccacctggctgcgaccattgacactgcctgagctacagcgctgcctgggcattgttggtgctcaggtggccctagaagaggctgtgtggctggatggacttagtctccttcccttggcactggcagcggacatccctgtacggtatgaaagcagtgacactgacaatgcagaggtggagcctgttggaagaaaagagaccaggtctcagcttgactatgaagttcccagggaaaaggccttccaaaagagcagcaccggcttttcacctgagacttccttcctggatagccaggtgatgactgctctgaagatggagagatacctgaagaagatccacttcctctatctcaatgtggctcccagccggtactttaggccttacagcctgatggtggtgccacccgacaaggtgaatcccgagcactacatcttctctccctttgggatcttgcatgtacatcctgtggaaggtagcgagacgatgacactgggtacctggcaccatcactgtgttctctggcagcagctccagttcattccattctttaagtattgcctcttacgcaagtcctttacctgttggaagaagaatgtgagattacaggggctgcatcgactccagaaattcctagagaatcatctgctcttggctgtgccccactttggagctgggctactccatattagcaggcttctgcaggagctacactctgtgtcctggctaccccaggaactggatcggtgctatgagctgctggacctgcagacggctctagccgaggagaagcataaggctctacggctgctccatcgttgcctaaacctctgcacatccattcttcgactggttcacgaggacacataccacatgcaacagtgcctacaggagcgagtacaaaactgtgacaggatcaggacaggccaaggctccatataccttcagagggtacagcacaagcaactggagcagaagctgaagcaagcagaggcctggtggctgcagctgggaaagtttgcccgcctggttgactacatgatttgtcagagcctcatttctgtcttggaagagcagataacctcttttgtggccaacatccttcaagccccaaggcagaaaccctttctctcatcacagctggtctttgatgatcatggtcaactgtctcatgtgccctgtgttgaaaatatgatccagactctaactggaggcctacagtctgtcaagacctctgccttgcaggtagtgcagtctgcagacctgaagacctcctcggattccctgtattctgaagaagaagatgaagaggaggactcaaaagacgaatttctgatgcccaagttccagggccagcccagcgatgctgtgagcatcttctgtggcccgaatgtgggattggtgtggccctggaagtctcacccaattgctggtatcttggaggtccgtggatgtcggctgcggggccaatacttcccccacaattataagcagctggaggaagacctggacaacaaccctaagatccagcaggcactgaatatacaacaggtgctgctggagggcgtgctgtgcaaggtgcaggaattctgcagggaacatcattggataacaggcatttatgaattcctgcaatcctgggggcctcagaagctggaagacatgagaggtggtcccatcaagaactacgtgacgctggtgagccgcctgaatgtttggcaggcccgtgtctccagtatgcctatcgagttgctcacaaaaggcgggttgctgctacttagctgccatgatgtacaggcagagatggaatccaagctgaacagcataaggaaggacattcttgcacacgtgcaaaatgagtgctggaacctcagtcaacaactcatgacagagctcacagatttcatgcatatcttccgaaccatcaactcagatattcatgccattgcacagtgcacccagaagttgaatgaagccaatgaacagtacgtcgagctggaggagcgaatggaatacgtacgggcactccacgaactcatccgcaaccactttagcctctttagtgctgagaatgaagcactggacatctcggtgagaaggcaattcggggagtcacccatccctccctgccctcctcccccacaaccacatctactccactgccctctgcttgccccacagcttctggatatgtgggaggcatttcagtttgagaaaagccaggcttcagagttcctgctcagcaagcgacatgccattatgcccaagctgcagcagctgatggcagcagcattggcagagctggaaggcctgcttgcgaaggccctctccggtccctttatggaccccacacaagatcagaggagtactgagcaccagctcgtctccctagagcgtcagttccagaacacagtcagcgacctcagtgaactgcaccacgcctatgccatcttcactgaggatgagactcctgtgcccttgccaatctgtgggacacgtcctattgtgcagcagcagcgcatatggcacctgtaccgagtcatctccgaaaacatcagcgagtggaagtgcatggcttttgccaagttcagcccagctatggcccaggagaagacagagggctggctgacagaggcagcacggatgagcacaaccctggagctgcacagccccgtgctgcagcactgcatgcgcatcctgggggagtttcgcagctacctgcccctgctcactaagctgggcagcctccacccacagagcctcaactgccagtgtctcctgcgtgcccttgggctgggcagtctccaaactatagaactcctaacgctgggccagctgcttacttatccactgctggagtttgcagatcgaatcaaccaggtctggcagaatgaaaatgaacgaattcatgcccaagagactatacggcggttgcagcggtactgggaagcgcgccagctgcgcctgctcaacttcatcctgcatgtaccctacgagcccccagcctcagagcgctccaagaggcaggtgctccgcagcccccaatgggaggtagtggacaaagatagtggcaccttcatcctctcagattacagcaacctgcaggattccatccaggaaagtcttcaggtgttgtccaagatcttggccatcgaaaagtcaggagatttaaacaaaatagctttggagtgggtggccatcatgcatggcctgggtgccctgctggaggtgtggctgactttccagcagaagtggatttttctgaataaagttctgcatgagatgaagatccagtttcctaatgctgacctgaactctcgtttcaaggtcatggatgaccagtatcgaaccctgatgcgcatctctgtagctgaccccatggttctgtcacttgtagtgcccagtgccgagaggagcccttacttccaaggccagcagctgcaacaactgctgcaagcaggatcggtggagctggagggcatcatcatgagtctggagagcgtgctctatggggtgtgtgctcacttcccccgcctcttcttccttagtgacagtgagctggtagccctgctggctgctcgactggaatcatgcgaagcccagctatgggtacgacgctgctttcctcatgtgcatgctgtgagcttcaggtcttgcccaactggtgagaaaaacacagatgactgggagtcaagcccaaacacacagactcaggtggaggcacttgcagtgctaggggcaggtggggaggaggtgaagctgcagggtccccttcctctgcatccagatctccctaagtggctggcctctctggagaagtgtctgcgcttggcactggtgcacatgctgcagggctgtgtggctgctcgccttgctcgaggcccatctctaggtgaggccctcaagcaactgcccaagcaaaacaagttgtacctgcaactgtatgtccagcactggatcgacttagtccaggccttcccatggcagtgtgtgctggtggcagaggaggtggtatggcgggccgagatggaggaggctctgcttgagtggggtaccctggccatggtctccatgcatatgcgcaagcttgaggtactggtgaattttatgcgggcccagagggcttcccaaggtgggcagtccctgccttctgtccgccagaccagccttctcagtgccctgctggtcatggcagtgactcaccgggatatagcacagctgctggaacagcaccaggtcagtgatctcacagactttcactgggtccgccaactcaagtatcacttgggttcacctcacataatccccaaaagccccctacagagtcttaagactattgcatcttctgaaccctctctgtcaccagcggcatgctggatagatgtgctaggcaggtccttcctgtacaattacgagtatctgggacctagactagggcctctacccagcctactgcctgaacggccagccctggtactattattggccctagaggaggtggcctgtgggaccgtactgggtcctaatggtgtgggcaagagagctatagtgaacagcctggcacaggccctgggccgccagctggtgatgctaccctgctcacctcagatagaggctcaatgcctgagcaactatctgaatggtgccctgcagggtggtgcctggctgctgttggagaaagttcatcagctgccccctggcttgctctctgccctgggccagcgcctgggtgaactgcaccacttgtatgccccactgtaccaggaggcttcccgaaacacaagcaccatagaccccacccagccccagctccttggcagtagcttctttgaaaaacatcacgtgtctgtgcgccttggctatggctgtctcctggtactgcgtgccctgagctctgctgtgcctgccaacctgcacctgctgctgcggcctgtggcattggcattgcctgatctgcggcaagtggcagagctgactctgctgggtgcagggatgagggatgccttccagatggctacccgcctatccaaattcttctctctagagcgtgagctggtgtctgggcccctgccctgccgcctgccactgctcaagcagatactggaagacacaatacggacactaaatgtgaccaaggaggaaccgaagtgccagaagcctcgcagcctagctgccattgaggaggctgccctactgcgctcaccactgtttagcattctcaatgggctccacctgcacaacctccgagggctgttgtgtgcgcttttccctagcgccagccaagtgctggcagaacctatgacttacaagctgatgaagccattggtggtggaggaactgcaacaggtaggtctggatcccagccctgacattttggggtccttggaacagttgagccaggccctgagccgggcctcaggcattctgctcctgggccctgcgggcagcggcaagaccacttgttggcacagcttatttaagatccagaatcggctggcagccatggaggacacctcaacccaaggctgccagcctgtggaaattacccacctgtaccccagtggcctcagcccccaggagttcctgggatggctagagggctcctgctggcatcatggcatctttcccaaggtacttcgtgcagccggtcagtgtaacaacatgggccaaaagaggcagacagaggaatcaatcgggatccagcactggataatatgtgatggagcctccaatggtgcttggctggactccatcacttgcctcctgagtgagcttccccagcttagtctccccagtggacagcagatagcacgacccccaggcacctttctcttgatggaggtggctgacacaacaggcatatcccccacagtggtaggctgttgtgccctagtctggtgtggtggagagcagacttggcagtgtatacttagtgccctgatggcatcccttccttatgagtaccgcctgcagcaccggacagtcgctgagctcaaccacatggctgaggttctggtgcctgcaacattgcgattcctcacctgccaaggtgtcagctctctgctgcaggtacacgggcagcaggctgtttgtgcaggtgtggcagaagttaccagcatggcacgcatcttgcatagtctgcttgacctccaccttcgcctaaaggaggagaaggcccctggcccagaggacctcagctatagtgatcctgtggcccaaagcttcaggtcttcaaaaagcagctttctaaaccggtcccaggttgacagtgacgatgtgccagataagtgcagggaacacttgctggctgtcagcagttttctttttgccttgatctggggctttggagcccaccttccctccaggttctggcccatctttgataccttcataagggattctattagtcgcctctccaactaccctgagccaccaccctcagccttggtgtttgatctacatgtaagccctgaagatggaacactggtccccttcactggccaatacctgagcagccacatcaaaggaactttgggcacctttcacccttctatccagactgaacggctcttgtatgtggtggacctgcttctgtcagggggacagccagtgttgctggctggagaggcagcaacagggaagtcagcctttgtggaggtgctggtagagccacatcacccttacatatacagccccatccaccctgccttcagttcctcccacctccgtctcctgctgagcagaggaatccagggccaaacacaagccagcccacagcctgggcatcaccaggattctaaaccctccctcctcttcttgctggaggacctgcacctagccacttctgacccagagaagagctgccagccagtgttggagactctgcgccaggccatggatggcactgtgtatgcccacagcaccttggaactgcagacgctgcagcctacagtcaacttccttgccactgtcacagtgccaggatactgtgagcgcccactgtgtccacgcctctttcgactcttcacagtcctggccctggaaagcatgacccaggccaccctgctggaaagacatgtgcctatcattcaggcttggcttgagcgtttcccttctgtggaacgggagcgtgctctggcacgaggtctggttagggcctcagtagaggcctgggaggctgtgtgcaattgcttcatgccttcacccctccacccacactaccacttctccctacactctgtgagccacctactgagcagcctgcagctgctgcccaacagaacaggctcccgaggttttgtggactatcccaaccaccaggagcacttgcgccgggtgtcaggcctgcgaggcacttgtctgaccgttatgatggccacacgcaatgtggtgcgtctttggttgcatgaggcacagagaaccttttgcgaccggctggacagccccagggaacgctcctactgtgccaagctgctcctagtagtagctcaaagtgtcttctgctgtgggccagggccccagcacctgggcaaggaccatcaggagagtgaggaggaggaggaggaggagagggtgcccgaagtagaatctgaaggggagttggcccagtgggaggacttcagcaacagcaatagtgaaacagaggaggaagaggaaccttatggccttcaggtcgccagagtctcaaactccagagatccaagtctaacaccatccataggaccagtaagcagggggatgaaggaaagcataagtcacaagataaggcaagagaaaggcacaagggcatccaactataggctccaggtaaggagatcattcaagacttggtggcagaagaaaccccagatggacctgatctcacccttgttgttaccagtgttactactacatccccaggaaaagccctcagacctggtcttcagtcaggagctgatactggggcctaactctgagacccccaacttgtacctggaacgacagtgggagaagctagaggagcagttggccacctcagctgctcaactgaagttgagcccccacctggcccggtgtcattccatggcccagcacgtggcccgcctggtccgggtgctggccaggccccggcagcatggcctgctgctctcgggggctctgggtactgggcgccacactgccatcactctggcttctagcatttgtcaggcccatttctttcatctaccatctgggtcagaggaggccattctccaatgtctacgagatgccagctggcatgctggcatgttaagccagccagtggctctgttggtacccagtggtgtggatctcactacacttcatcgcctcctggccctggcaacctcaggcagtttccctggccagtacacagaagcagatttggaccgcattggagaacacctccccagggagaaccttggtgtcaaacagaacatcaagaaggaaatggtgttgcagaggttccaccagcaagtgtgcagccaccttcacctgttcttcctgattggagataaacaggcccacaagcagctgccctccacccttttcctgaggctccttcaactggccactgccagcattgaccgctatgaaccctgggaccaagctgccctggccaaggtggcccagcatcacctggagggtgctcagagtgtgccccttgatgacggctcctggaagtacccagacctccaggcctcaattcccagtgtggccaaagccatggctcttatccacctttcggccacccactaccatgagcacctgtgccctgcattgccactcgtcacccccaagaccttcctagacttcctggacactttcctgatgctgcagcaacagacaatcctgaagattaagaacaaggcccagcgggtccagaatgccttggagaatctgagaatgctgattaaggagcacggtacccatgccaatctgatctttgacttggaacagcagctgaaagactccggcaagagtctcagcatgtttcagcagcagctagagcaaagcaagctcctatacaagcagcagctggaagagtgtcggcatcaagagaacctcattgagaacctggccaggcaacgggatgccctgcaagctcagcgagaggctttcctggagcagatgagcaaggcatttctggagcctctgagccagctgcaggtggctgactttgaggagatacggagctatcgagcaccaccagaatctgtggtccgggtaactgatgcaatgtgtgacttgttccaccatgaaacaggctgggccagtgccaaacagctgttatgcactgaggatttttatcaggagctggtgttcttccccaaggagaagataacagactcagagctgataaagttacatctaattctgaaggctccaggtatggacgatgcagccctgcgggcagtgagccgacctgcagccagcctggcagcctggctctgggctgttctgcactatgggctggcgcattgccggggactgcccacggacctgctgctgcagcaagtggaggcaacactcactcgggagcaggcccgcctgggctactaccagtttcaggcccaggagaccctggagcataatttggccctggctaagatggtggaggatgcccaagcttcccacaactgcgtggcaaagaccctcagtcaagcacagtgtgggcagtatcacaaatggcccatgaaggctgcactgctcacgcctatgcgtgcctggactacacagctccagaagctgaagggacgctgcatgactgtgtttggagataccctcctatgttcagctgccatcatctacctgggtcccttcccaccattgcggcgccaagagctactggacgagtggttagctctgtgtaggggctttcaggaggctctgggcccagatgatgtggcacaggcactgaagcggaagcaaaaatctgtcagcataccaccaaagaaccccctgctggctacacactctcccttcagtattctgtccttgctgagctctgaatcggagcagtaccagtgggatggaaacctgaagccacaggcaaagtcggcccacctggcaggcttgcttctgcgaagccccacacactacagtagttgccgttggcctctgctgcttgaccccagcaacgaggccctcatctggttggacccgctgcctctggaagagaatcgatcttttgcgccagccctcactgagggtagagggaaaggcctcatgagaaatcaaaagagagagagtaaaacggacatgaaagaggaagatgatgagagtgaagagagtaatgaggctgaggaccagacaaaagagcagaaggcagaggaaagaaaaaatgagcaggagaaagagcaagaggaaaatgaagagaaagaggaggagaagacagagagccaggggtcaaagccagcctatgagactcagcttccatcccttccctaccttagtgttctttcaggtgctgacccagagctgggttctcagctccaggaggcagctgcttgtggcctgcctgtgttactgaccaatgtggagctgggtctagggtgcgaagaactgcaatggctgctgcaacgggagcagctgagtccaccccaggtgcagcctggcttctgtctgtatctcagcaccaccctctccctctgtgccatggaaaaagtgctaggttgtgaactgctaaaggggctgaatgtgttggatctgggcctgaacatggaaatactggaagaacagatgctgcatgaaatcttgtgcagagagtatcctgaactcgagacccgctggcaggacctaaagatcagagccctagatacctgcaaggctgtggaggctgctgaggagcggctgctgacgatgctgctgttccagaatccgaagcgtcagaagccagccaagtttctgcggaacatagtgagggcccaaggaaagctatgccagctgcgtgctcattgtgaagagttagaagggcagaaactacaggagatggtattgtgggcaccctatcgacctgtggtttggcatggaatggccatggtaaaggccctaagccaactgcagaacctgctgccacttttctgtatgagcccagagaactggctggcagtcactaagcaggctctggacagcatgaagccacgtgagattaatcacggggaggacctggccagccatctactgcaattgagagcacacctgacccgccagctgctgggcagcaccgtgactgcactgggccttacccaagtacccttggtgggtgcattgggcgctttggctctgctgcaagcaacagggaaagcatcagagctggaaagactggcactctggcctggactagcagcctctcccagcacagtccacagcaagccagtctcagatgtggctcgaccggcctggcttgggccaaaagcctggcatgaatgtgagatgttagagctgctgcccccatttgttggcctgtgtgcctccctggcaggccactccagtgcttggcaggcttacctgtcactgtcatccacagtgctgggtcctgcacctgggccagggcctgagccactcagcctcctccagaagctgatcctgtggcgcgttctgcgacctgagtgcctggcaggtgccctggcagacttcaccactagcctcctgggtcggcccctggatgaaaacacgtatgctcccaccatgccctttaaacatagtcaggctactcagcccatgctgatcttgttgccaccgcctggccacccctcagccactctgcatcctctgactgtcatccagaaactggctgccaagtatcagcaggggcagaagcaactgcaggtgatagccctgggctctgaagcctgggacccagtctcagttgtggtcagcactctatcccaggctatgtatgaggggcactggctggtgctggacaactgtcatctgatgccccattggccgaaagagctgctacagctcttgctggaactgttaggcagagccaaggtggttgcagacctggaatcagaacagcttttagaccaacctgaaagcaggaatgtaagcactgttcacagagattttcgtctttggcttattgtgcctgcagagtctagtgcttctttgccagctgtgctgactcagcactccatgcctgttttctggaaccagtccctggagctgggccatgttttgattgacagtgtggagctagcccagcaagtactctacatgcaaccccccacccaggcactacctctgctcctcctccatggcctcctgctacaccggcagctctatggaacaaggctgcaggcacacagggggcgctggagtcaagtgactctaacccaggttcttcagacccaagaccagctgtgggcaagtcttagcaatccccgtgctgccatgcaagagctggctgcttcagttttctacgggggtcctctgggggacactgaggacagggaggccctgattagcctcacacaagcctgcctgagccccagtagtgggagctgggtccagccacacacacctcagtctttgctggccacgctcatgcccctcccagagctaagggagctggatgcaatggcagagtgcaaggcccagatgcacctactgccctcaccacctgaaccccggctctgcggactgagtgagggcccccaagcctggctgttgcgacgccagagtcgcgctctcttgagtgcgctgcagcggagttcacccgtgtgggttcctgagtctcgaagaggcgcccagcttgcggaaaggcgactgcggcaacgcctagtgcaagtcaaccggaggctggagtcactgcaggatctgctgacccacgtgattcgccaagacgagtccgacgccccgtggtcagtgctggggccaaatgcacggcggcctctggagggcgtcttagagaccgaggctctagaactgagccagttggtgggcacgctacaacgcgaccttgattgcctgttgcagcagctgaagggcgcacccccgtgcccctcccgccgctgtgctgcggtggcccacgctctctggactggccgcctacccttgccttggcgacctcatgcgccggccggtccgcagccgccctggcactggctgcgacagttgtcgcgccgtgggcaactgttggttcgttacttgggcgtgggcgcggacgcgagcagtgatgtaccagagcgcgtcttccacctgtcagcctttcgccacccgcgccgcctgctgctggcattgcgtggggaagctgccctggaccagaatgtgcccagctcgaatttccctggtagccgaggctcggtctccagtcagctccagtataaacgtctggagatgaacagcaaccctctgcacttcagggtggagaatggtccaaatcccacggttccagagagagggctgctgctgatcgggctacaggtcctacatgcggagtgggacccaatagctggagccttgcaggacagtccttccagccaacccagccctctgcctcccgtcagcatcagcacacaggccccgggcaccagtgacctgccagccccagccgacctgactgtgtactcgtgtcctgtgtacatgggagggccccttggcaccgctaagctgcagagcaggaacatcgtgatgcatctgcctttacccaccaagctcacccccaacacctgtgtccaaaggagggtccatgtgtgcagcccacccctgtcttgagcccgtctaccaaaataaagttgtagtgattccatgaaaaaaaaaaaaaaaaaaaa

SEQ ID NO: 181 - DNA, 1109 bp, HOMO SAPIENS
ggctggattcccgtcgtaacttaaagggaaattttcacaatgtccggagcccttgatgtcctgcaaatgaaggaggaggatgtccttaagttccttgcagcaggaacccacttaggtggcaccaatcttgacttccagatggaacagtacatctataaaaggaaaagtgatggcatctatatcataaatctcaagaggacctgggagaagcttctgctggcagctcgtgcaattgttgccattgaaaaccctgctgatgtcagtgttatatcctccaggaatactggccagagggctgtgctgaagtttgctgctgccactggagccactccaattgctggccgcttcactcctggaaccttcactaaccagatccaggcagccttccgggagccacggcttcttgtggttactgaccccagggctgaccaccagcctctcacggaggcatcttatgttaacctacctaccattgcgctgtgtaacacagattctcctctgcgctatgtggacattgccatcccatgcaacaacaagggagctcactcagtgggtttgatgtggtggatgctggctcgggaagttctgcgcatgcgtggcaccatttcccgtgaacacccatgggaggtcatgcctgatctgtacttctacagagatcctgaagagattgaaaaagaagagcaggctgctgctgagaaggcagtgaccaaggaggaatttcagggtgaatggactgctcccgctcctgagttcactgctactcagcctgaggttgcagactggtctgaaggtgtacaggtgccctctgtgcctattcagcaattccctactgaagactggagcgctcagcctgccacggaagactggtctgcagctcccactgctcaggccactgaatgggtaggagcaaccactgactggtcttaagctgttcttgcataggctcttaagcagcatggaaaaatggttgatggaaaataaacatcagtttctaaaagttgtcttcatttagtttgctttttactccagatcagaatacctgggattgcatatcaaagcataataataaatacatgtctcgacatgagttgtacttctaaaaaaaaaaa

SEQ ID NO: 182 - DNA, 14751 bp, HOMO SAPIENS
attgatcagctgaagccccgcccctggccggcaagccctgccccggacctccgggctcctcccccggctgcggcgctggcctgggcagtgcggtgcggggctggactctgcctggtggtggcacagccgccctcagccccggcgcagacatggacccctcgcgagccatccagaacgagatcagctccctcaaagatgagcgggatcgtgtgcagaagaaaaccttcaccaagtgggtcaacaagcacctcatcaaggcccagaggcacatcagtgacctgtatgaagacctccgcgatggccacaacctcatctccctgctggaggtcctctcgggggacagcctgccccgggagaaggggaggatgcgtttccacaagctgcagaatgtccagattgccctggactacctccggcaccgccaggtgaagctggtgaacatcaggaatgatgacatcgctgacggcaaccccaagctgacccttggcctcatctggacaatcattctgcacttccagatctcagatatccaggtgagtgggcagtcggaggacatgacggccaaggagaagctgctgctgtggtcgcagcgaatggtggaggggtaccagggcctgcgatgcgacaacttcacctccagctggagagacggccgcctcttcaatgccatcatccaccggcacaagcccctgctcatcgacatgaacaaggtgtaccggcagaccaacctggagaacctggaccaggccttctctgtggcggagcgggacctgggagtgacgcggctcctggaccctgaggacgtggatgtccctcagcccgacgagaagtccatcatcacctacgtctcgtcgctgtatgacgccatgccccgcgtgccggacgtgcaggatggggtgagggccaacgagctgcagctgcgctggcaggagtaccgggagctggtgctgctgctgcttcagtggatgcgacaccacacggccgcctttgaggaacgcaggttcccctccagcttcgaggagattgagatcctgtggtctcagttcctgaagtttaaggagatggagctaccagccaaggaggccgacaagaacaggtccaagggcatctaccaatccctggagggagcggtgcaagcaggccagctcaaggtgccccctggctaccacccgctggatgtggagaaggagtggggcaagctgcacgtggccatcctggagcgggagaagcagctccgcagcgagtttgagaggctggagtgtcttcagcgcatcgtgaccaagctgcagatggaggcggggctgtgtgaggagcagctgaaccaggccgacgccctgctgcagtcggatgtccggctgctggctgcaggcaaagtgccacagcgggcgggggaggtggaacgggacttggacaaggcggatagcatgatccggctgctcttcaacgacgtgcagaccctcaaggatggacggcacccgcagggcgagcagatgtaccgcagggtgtaccgtctgcacgagcgcctggtagccatccgcaccgagtacaacctacggctgaaggcaggcgtggcggcccctgcaacccaggtggcccaggtgactctgcagagtgtgcagaggcgccccgagctggaggactccactctgcgctacctgcaggacctgctggcctgggtggaggagaaccagcaccgtgtggatggcgctgagtggggtgtggacctgcccagcgtggaggcgcagctgggcagccaccgaggcctgcaccagtccatcgaagaattccgggccaagatcgagcgggcacggagtgacgagggccagctctcccccgccacccggggtgcctaccgtgactgcctgggtcggctggacctgcagtacgccaagctgctgaactcctccaaggcccgcctcaggtccctggagagcttgcacagctttgtggcagccgccactaaggagctaatgtggctgaatgagaaggaggaggaggaggtgggcttcgactggagcgaccgcaacaccaacatgaccgccaagaaggagagctactcggcgctgatgcgggagctggagctgaaggagaagaagatcaaggagctccaaaatgctggggaccggctgctgcgggaggaccacccggcccggcccacggtggagtccttccaggcggccctgcagacgcagtggagctggatgctacagctgtgctgctgtatcgaggcacacctgaaggagaacgctgcctactttcagttcttctcagatgtgcgggaggccgaggggcagttgcagaagctgcaggaggcactgcgtaggaaatacagttgtgatcgctccgccaccgtcacccggctggaggacctgctgcaggatgcccaggacgagaaggaacagctgaacgagtacaagggccacctctcaggcctggccaagcgggccaaggccgtcgtgcagctgaagccccgccacccagcccaccccatgcggggccgcctgcccctgctggccgtgtgcgactataagcaggtggaggtgactgtgcacaagggtgacgagtgccagctggtgggccctgcacagccgtcccactggaaggtgctcagcagctccggcagcgaggccgccgtgccctccgtgtgcttcctggtgcccccgcccaaccaggaggcccaggaggccgtcaccaggctggaggcccagcaccaggccctggtcacgctgtggcaccagttgcacgtggacatgaagagccttctggcctggcagagccttcgccgcgacgtgcagctcatccgctcctggtccctggccacgttccgcaccctgaagccagaggagcagcgccaagccctgcacagcctggagctgcactaccaggccttcctgcgggacagccaggacgcgggcggcttcggacccgaggaccggctgatggctgagcgcgagtacggctcctgcagccaccactaccagcagctgctgcagagcctggaacagggtgcacaggaagagtctcgctgccagcgctgcatctccgagctcaaagacatccggctgcagctggaggcctgtgagacgcgcaccgtgcaccgcctgcggctgccgctggacaaagagccggcacgggagtgtgcccagcgcatcgccgagcagcagaaggcacaggcagaggtggaggggctgggcaagggggtcgcccggctctctgccgaggccgagaaggtcttggccctaccagagccatcgcctgcggcccccacgctgcgctcggagctggagctgacgctgggcaagctggagcaggtccgcagcctgtctgccatctacctggagaagctcaagaccatcagcctggtgatccgcggcacgcagggggccgaggaggtgctcagggcccacgaggagcagctcaaggaggcccaggccgtgccggccaccctcccggagctcgaggccaccaaggcctctctgaagaagctgcgggcccaggccgaggcacagcagcccacgttcgacgccctgcgggatgagctgcggggggcacaggaggtgggggagcgactgcagcagcggcacggggagcgggacgtggaggtggagcgctggcgggagcgggtcgcccagttgcttgagcgctggcaggctgtgctggcccagaccgacgtgcggcagcgcgagctcgagcaactgggccgccagctgcgttactaccgcgagagtgcagaccccttgggcgcctggctgcaggacgccaggcggcggcaggagcagatccaggccatgccgctggccgacagccaggctgtgcgggagcagctgcggcaggagcaggccctgctggaggagatcgagcgccacggcgagaaggtcgaggagtgccagaggtttgcgaaacagtacatcaacgccatcaaggactatgaactccagctggtgacgtacaaggcgcagcttgagccggtggcctccccggccaagaagcccaaggtccagtcgggatcagagagtgtcatccaggagtacgtggacctgcgtacgcactacagcgagctgaccacactgacgagccagtacatcaagttcatcagcgagactctgcggcgcatggaggaggaggagaggctggctgagcagcagcgggcagaggagcgcgagcggctggccgaggtggaggccgcgctggagaagcagcggcagctggccgaggcgcacgcccaggcaaaggcacaggcggagcgggaggcgaaggagctgcagcagcgcatgcaggaggaggtggtgcggcgggaggaggcggcggtggacgcgcagcagcagaagcgcagcattcaggaggagctgcagcagctgcggcagagctcggaggcggagatccaggccaaggcccggcaggcagaggcggctgagcgcagccggctgcgcatcgaggaggagatccgcgtggtgcgcctgcagttggaggccaccgagcgccagcgtggcggggctgagggggagctgcaggcactgcgtgcacgggcggaggaggctgaggcacaaaagcgacaggcgcaggaggaggccgagcgcttgcggaggcaggtgcaggacgagagccagcgtaagcggcaggcggaggtggagctggcctcgcgcgtgaaggccgaggccgaggcggcgcgcgagaagcagcgggccctgcaggccctggaggagctgcggctgcaggcggaggaggcggagcggcgcctgcggcaggccgaggtggagcgagcgcggcaggtacaggtggccctggagacggcgcagcgcagtgcagaggcggagctgcagagcaaacgcgcctccttcgccgagaagacggcacagctggagcgctccctgcaggaggaacacgtggctgtggcacagctgcgggaggaggctgagcggcgggcacagcagcaggccgaggccgagcgggcgcgcgaggaggcagagcgggagctggagcgctggcagctcaaggccaacgaggcgctacggctgcggctgcaggcggaggaggtggcgcagcagaagagcctggcgcaggccgaggctgagaagcagaaggaggaggcggagcgcgaggcgcggcggcgcggcaaggcggaggagcaggccgtccggcagcgggagctggctgaacaagagctggagaagcagcggcagctggcggaaggcaccgcgcagcagcgcctggccgcggagcaggagttgatccggctgcgggccgagacggagcagggggagcagcagcggcagctgctggaggaggagctggcccggctgcagcgtgaggcggctgcagccacgcagaaacggcaggagctggaagccgagctggccaaggtgcgggccgagatggaggtgctgctggccagcaaggcgagggctgaggaggagtcgcgctccaccagcgagaagtccaagcagaggctggaggccgaggccggccggttccgcgagctggccgaggaggccgcccgcctgcgtgccctggcggaagaggccaagcggcagcggcagctggccgaggaagacgcggcgcggcagcgggccgaggcggagcgggtgcttgcggagaagctggccgccatcggcgaggccacgcggctcaagacggaggcggagatcgcgctcaaggagaaggaggcggagaacgagcgcctgcggcggctggcggaggacgaggccttccagcggcggcggctggaggagcaggccgcgcaacacaaggctgacatcgaggagcgcctggcccagctgcgcaaggcatcggacagcgagctggagcggcagaaggggctggtggaggacacgctgaggcagcggcggcaggtggaggaggagatcctggcgctgaaggcgagcttcgagaaggcggccgctggcaaggcggagctggagctggagctgggacgcatccgcagcaacgcggaggacacgctgcgcagcaaggagcaggccgagctggaggctgcgaggcagcggcagctggcggcggaggaggagcggcggcgccgtgaggctgaggagcgcgtgcagaagagcctggcggccgaggaggaggccgcacggcagcggaaggcggcgctggaggaagtcgagcggctgaaagccaaggtggaggaggcgcggcgcctgcgggagcgagcggagcaggagtcggcgcggcagctgcagctggcccaggaggccgcccagaagcggctgcaggcggaagagaaggcacacgccttcgcggtgcagcagaaggagcaggagctacagcagacgctgcagcaggagcagagcgtgctggaccagctgcgcggcgaggcggaggcggcccggcgggcggctgaggaggcggaggaggcccgggtgcaggcggagcgtgaggcggcgcagtcccggcggcaggtggaagaggccgagcggctgaagcagtcggcagaggagcaggcacaggcccgggctcaggcacaggcggctgcagagaagctgcgcaaggaggccgagcaagaggcggcgcggcgggcacaggcggagcaggcggccctgcggcagaagcaggcagctgacgcggagatggagaagcataagaaattcgccgagcagacgctgcggcagaaggcgcaggtggagcaggagctgacaacactgcggctgcagctggaggagaccgaccaccagaagaacctgctggacgaggagctgcagcggctgaaggcggaggccacggaggccgcacgccagcgcagccaggtggaggaggagctcttctcggtgcgcgtgcagatggaggagctgagcaagctcaaggcacgcatcgaggctgagaaccgcgcactcatcttgcgtgacaaggacaatacgcagcgcttcctgcaggaggaggctgagaagatgaagcaggtggcggaggaggccgcgcggctgagtgtggcggcccaagaggctgcgcgactgcggcagctggcagaggaggacctggcacagcagcgggccttggcagagaagatgctcaaggagaagatgcaggcggtgcaggaggccacgcgactcaaggctgaggcggaactgctgcagcagcagaaggagcttgcgcaggagcaggcgcggcggctgcaggaggacaaggagcagatggcgcagcagctggcggaggagacgcagggcttccagcggacgctggaggccgagcggcagcggcagctggagatgagcgctgaggctgagcgcctcaagctgcgtgtggccgagatgagccgagcccaggcccgcgctgaggaggacgcccagcgcttccggaagcaggcggaggagatcggtgagaagctgcaccgcacggagctcgccacccaggagaaggtgaccctggtgcagacactggagatccagcgacagcagagtgaccatgatgccgagcgcctgcgggaggccatcgctgagctggagcgtgagaaggagaagctccaacaggaggccaaactgctgcagctcaagtctgaggagatgcagacggtgcagcaggagcagctgctgcaggagacgcaggccctgcagcaaagcttcctctctgaaaaggacagcctgctacagcgggagcgcttcatcgagcaggagaaggccaagctggagcagctcttccaggacgaggtggccaaggcacagcagctgcgtgaggagcagcagcggcagcagcagcagatggagcaggaacggcagcggctggtggccagcatggaggaggcgcggcggcggcagcatgaggccgaggagggcgtgcggcgcaagcaggaggagctgcagcagctggagcagcagcggcggcagcaggaggagctgctggctgaggagaaccagaggctgcgtgagcagctgcagctcctggaggagcagcaccgggccgcgctggcgcactcagaggaggtcactgcctcgcaggtggctgccacaaagaccctgcccaatggccgggatgcacttgatggccccgcggcagaggcagagccggagcacagcttcgatggcctgcggcggaaggtgtcagctcagaggctgcaggaggccggcatcctgagtgcggaggagctgcagcggttggcgcagggccacaccacggtggacgagctcgcacggcgggaagacgtgcgccactacctgcagggccgcagcagtatcgcagggctgttgctgaaggccaccaatgagaagctgagtgtttacgccgccctgcagaggcagctgctgagtcccggcacggccctcatcctgctggaggcgcaggcggcctcaggcttcctgctggaccctgtgcggaaccggcggctgaccgtcaacgaggctgtgaaggagggtgtggtgggccccgagctgcaccacaagctgctgtcggccgagcgcgccgtcactggctacaaggacccctacactggccagcagatctctctcttccaagccatgcagaagggcctcatcgtccgggagcacggcatccgcctgctggaggcccagatcgccacgggcggcgttatcgaccccgtgcacagccaccgcgtgcccgtggacgtggcctaccggcgcggctacttcgacgaggagatgaaccgcgtcctggcggaccccagcgacgacaccaagggcttctttgaccccaacacgcacgagaacctcacgtacctgcagctactggagcgctgcgtggaggaccccgagacgggcctgtgccttctgccactcacggataaggctgccaagggcggggagctggtctacactgactccgaggcccgggacgtctttgagaaggccaccgtgtctgcgccgttcggcaagttccagggcaagacggtgaccatttgggagatcatcaactcggaatacttcacggcagagcagcggcgggacctgctgcggcagttccgcacgggccggatcacagtggagaagatcatcaagatcatcatcacggtggtggaggagcaggagcagaagggccggctttgctttgagggcctgcgcagcctggtgccagccgccgagctgctggagagcagggtcatcgaccgcgagctctaccagcagctgcagcgaggtgagcgctctgtgcgagacgtagccgaggtggacactgtgcggcgggctctccggggtgccaacgtcatcgcgggtgtatggctggaggaggcggggcagaagctgagtatctacaatgccctgaagaaagacctgctgccatccgacatggccgtggccctgttggaagcccaggccggcaccgggcacatcatcgaccccgccaccagcgcccggctgaccgtggacgaggcagtgcgtgctggcctggtgggccccgagtttcatgagaagctgctatcagccgagaaggctgtgacagggtacagggacccctacacagggcagagcgtctccctgttccaggccctgaagaagggcctcattccccgggagcagggcctgcgcctgttggacgcccagctgtccacgggcggcatcgtggaccccagcaagagccaccgcgtgcccctggatgtcgcctgcgcccgaggctgcctggatgaggagaccagcagggccctgtcggcaccaagggccgacgccaaggcctacagtgaccccagcacaggggagccggccacctacggcgagctccagcagcggtgccggcccgaccagctgaccgggctgagcctgctgccgctctcagaaaaggctgctcgggcccggcaggaggagctctactcagagctgcaggcccgtgagacctttgaaaagaccccggttgaggtccccgtgggtggcttcaagggcaggacggtgacggtgtgggagctcatcagctctgagtacttcactgcggagcagcggcaggagctgttgcgtcagttccgcacgggcaaggtcaccgtggagaaggtcatcaagattctcattaccatcgtggaggaggtggagaccctgcggcaggagaggctgtccttcagcggcctccgtgcccctgtgccagccagcgagctcctggcttccggggtcctcagcagagcccagtttgagcagctcaaggacggcaagacgacggtcaaggacctttcggagctgggctccgtgcggacgctgctgcagggcagtggctgcctcgccggcatctacctggaggacaccaaggagaaggtgtccatctacgaggccatgcgccggggcctgctgagagccacaacggctgcgctcctgctggaggcgcaggcggccactggcttcctggtggaccccgtgcggaaccagcgcctgtatgtccacgaggccgtgaaggcgggcgtggtgggccccgagcttcacgagcagctgctgtctgccgagaaggccgtcaccggctacagagacccctactcgggcagcaccatctccctcttccaggccatgcagaagggcctggttctccggcagcacggcatccgcctgctggaggcccagatcgccacgggcggcatcatcgaccccgtgcacagccaccgcgtgcctgtggacgtggcctaccagcgcggctacttcagtgaggagatgaaccgcgtcctggcggaccccagcgacgacaccaagggcttctttgaccccaacacgcatgagaacctcacgtacaggcagctgctggagcggtgcgtggaggaccccgagacgggcttgcgccttctgccactgaaaggggcggagaaggctgaggtggtggagaccacgcaggtgtacactgaggaggagacaagaagggcatttgaagagacacagatcgacattcccggcggcggcagccacggcggctccaccatgtccctgtgggaggtgatgcagtcggacctgatccccgaggagcagcgggcccagctgatggctgacttccaggccggccgggtgaccaaggaacgcatgatcatcatcatcatcgagatcattgagaagacagagatcatccgccagcagggtctggcctcctacgactacgtgcgccgccgcctcacggctgaggacctgttcgaggctcggatcatctctctcgagacctacaacctgctccgggagggcaccaggagcctccgtgaggctctcgaggcggagtccgcctggtgctacctctatggcacgggctccgtggctggtgtctacctgcccggttccaggcagacactgagcatctaccaggctctcaagaaagggctgctgagtgccgaggtggcccgcctgctgctggaggcacaggcagccacaggcttcctgctggacccggtgaagggggagcggctgactgtggatgaggctgtgcggaagggcctcgtggggcccgagctgcacgaccgcctgctctcggctgagcgggcggtcaccggctaccgtgacccctacaccgagcagaccatctcgctcttccaggccatgaagaaggagctgatccctactgaggaggccctgcggctgctggatgcccagctggccaccggcggcatcgtggacccccgcctgggcttccaccttcccctggaggtggcttaccagcgtggctacctcaacaaggacacgcacgaccagctgtcagagcccagcgaggtgcgcagctacgtggacccgtccaccgacgagcgcctcagctacacgcagctgctcaggcggtgccgtcgtgacgacggcaccggccagctgctcctgccactgtcggacgcccgcaagctgaccttccgtggcctgcggaagcagatcaccatggaggagctggtgcgctcgcaggtcatggacgaggccacggcgctgcagctgcgggagggcctgacctccatcgaggaggtcaccaagaacttgcagaagttcctggaaggcaccagctgcatcgctggtgtcttcgtggacgccaccaaggaacggctctcggtgtaccaggccatgaagaagggcatcatccgccccggcacagcctttgagctcctggaggcgcaggcggccaccggttacgtcatcgaccccatcaagggactgaagctgacggtggaggaggctgtgcgtatgggcattgtgggccccgagttcaaggacaagctgctgtcggccgagcgcgccgtcactgggtacaaggacccctactctgggaagctcatctccctcttccaggccatgaagaagggcctgatcctgaaggaccatggcatccgcctgctggaggcccagatcgccacgggcggcatcatcgaccctgaggagagccaccggctgcccgtggaggtggcctacaagcgcggcctcttcgatgaggagatgaacgagatcctgaccgacccctcggacgacaccaagggcttctttgaccctaacacggaggagaacctcacctacctgcagctgatggagcgttgtatcactgacccccagacgggcctgtgtctcttgccgctgaaggagaagaagcgggagcggaagacgtcctccaagtcctccgtgcgcaagcgccgagtggtcatcgtggaccccgagacgggcaaggagatgtcagtgtacgaggcctaccgcaagggcctgattgaccaccagacgtacctggagctgtccgagcaggagtgcgagtgggaggagatcaccatctcctcctcggacggcgtggtcaagtccatgatcatcgaccgccgctccgggcgccagtacgacatcgatgatgccatcgccaagaacctcatcgaccgctcggcactggaccagtaccgcgccggcacgctctccatcaccgagttcgccgacatgctctcgggcaacgccggtggtttccgctcccgttcctcctcggtgggatcctcctcctcctaccccatcagccccgccgtctccaggacccagctggcctcctggtcagaccccactgaggagacgggccccgtggctggcatcctggacacggagacgctggagaaggtgtccatcaccgaggccatgcaccggaacctggtggataacatcacggggcagcggctgctggaggcgcaggcctgcaccgggggcatcatcgaccccagcaccggtgagcgcttccctgtcaccgacgccgtcaacaagggcctggtggacaagatcatggtggaccgcatcaacctggcccagaaggccttctgcggcttcgaggacccacgcaccaagaccaagatgtcggccgcccaggccctgaagaagggctggctctactacgaggccggccagcgcttcctggaggtgcagtacctgaccggcggcttgatcgagcccgacacgccgggccgcgtgcccctggacgaggccctgcagcgcggcacggtggacgcccgcaccgcacagaagctgcgtgacgtgggcgcctactccaagtacctcacctgccctaagaccaagctcaagatctcctataaggacgcgctggaccgcagcatggtggaggagggcacggggctgcggctgctggaggctgccgcgcagtccaccaagggctactacagcccctacagcgtcagcggctccggctctaccgctggctcccgcaccggctcgcgcaccggctcccgggccggctcccgccgcggcagctttgacgccaccggctccggcttctccatgaccttctcttcatcctcctactcctcctcgggctacggccgccgctacgcctcggggtcctcggcctccctggggggccctgagtctgccgtggcctgaggctgcctgcgcccaccccgctctgcatgcggcccagcccggctcccaccgaggcgcgggggccgttttcaacgcttaaaggtgtcttcctcccaagtggtgcctaaagtttaaccaaaaagaccagactaatatattaatatatatctgctgtccagacagcctgtatcttgggggacagggctggcccagccctgctggccgcctcaccccctcgggtctcctcactcccttctacctgccactcacacagccaggtgccttggagggtcccaagctgggccccagcccaccctcctgtcttcccagggtagcccgcctgccagtcctagctgcacagggcagctgggcccaaccctgtctgtagagggccctggtgtttctagcactggcctgcacggtgggccttgctggggacggggggccccagtcagcctctctcccagtctacccagagaagccccttccccatgggaagacgaggccctcgggcccagcccccacagtgctgtctgatctgtgctttccagctcaccccccacactcactcctgagacccctggcctccggcgtcagcctccagcctctgttcccctagtaagtgccttccatgtcggcctctaaccccaggccccgaggacccagacccagtggggaggcggacgttccagccggcatggctgggaactgcagacctgtcctcctggtgggtccaggggcccctccagcttgtggagccccacactggggtgccgcctgcccgtctctctcccatggagccccagccccctttgggcccagggacaccagccaggctctgtgctgaccctcctgttgcacccagccctggtctcagcagcgaccacccctgcctccaccctctgagctttgcatgttccactaaccccgggcgggtggcaggtggaggtgtcaggctgctggcgcctctgcaagggcagaacactaacctgaccgtgggcggggccttgcggtatccgcccccaataaaagcaattccaacctt

SEQ ID NO: 183 - DNA, 5201 bp, HOMO SAPIENS
ccgcaccatgctcaagtgcatcccgctgtggcgctgcaaccggcacgtggagtcggtggacaagcggcactgttcgctgcaggccgtgccggaggagatctaccgctacagccgcagcctggaggagctgctgctcgacgccaaccagctgcgcgagctgcccaagccttttttccggctgctgaacttgcgcaagctgggcctgagcgacaacgagatccagcggttgcctcccgaggtggccaacttcatgcagctggtggagctggacgtgtcccggaacgatatccctgagatcccggagagcatcaagttctgcaaggctctggagatcgcggacttcagcgggaaccccctctccaggctccctgatggcttcactcagctgcgcagcctggctcacctggccctgaatgatgtgtctctgcaggcactgcccggggacgtgggcaacctcgccaacctggtgaccctggagctccgggagaacctgctcaagtccctgccagcgtccctgtcatttctggtcaagctggaacagctggatctgggaggcaacgatctggaagtgctgccagacactctgggggctctgcccaatcttcgggagctgtggcttgaccggaaccagctgtcagcactgcccccggagctcgggaacctgcggcgcctggtgtgcctggacgtgtcggaaaaccggctggaggagctgcctgctgagctcggcgggctggtgctgctcactgacctgctgctgtcccagaacctgctgcggaggctgcccgacggcatcggtcagctgaagcagctatccatcctaaaggtagaccagaatcggctgtgcgaggtgactgaggccatcggggactgtgagaacctctctgagctgatcctcacggagaacctgctgatggccctgccccgctccctgggaaagctgactaagctgaccaacctcaacgtggaccggaaccacctcgaggcgctgccgcccgagatcgggggctgtgtggcactcagcgtcctctccttgagggacaaccgcctggccgtcctgccaccagagctggcccacacgacagagctgcacgtgctggacgtggcggggaaccgcctgcagagtctgccgttcgcgctcacccacctcaatctcaaggccctgtggctggcagagaaccaggcgcagcccatgctccggttccagacggaggatgatgcccggaccggcgagaaggtgctcacctgctacttgctgccccagcagcccccactcagcctcgaggatgctgggcagcaggggagcctctcggagacctggagcgatgccccgccgagccgcgtcagcgtcatccagttcctggaggcccccataggtgatgaggacgctgaggaagctgcagctgagaagcggggcctacagcgccgggccacacctcaccccagcgagctcaaggtgatgaagaggagcatcgaggggcggcggagcgaggcctgcccttgccagccagactctgggtcgcccttgcctgcagaggaggagaagcggctgagtgccgagtctggcctgagtgaagactctcgcccatctgccagcacagtctctgaggctgagcccgagggcccgtcggctgaggcacagggtgggagccagcaggaagccacgactgctggcggggaggaagacgccgaagaggactaccaggagcccacggtgcatttcgcagaggacgcactgctgcccggggatgacagggagatcgaggaggggcagcctgaggccccctggaccctgccaggcgggaggcagcggctcatccgcaaggacacacctcactacaaaaagcacttcaagatctccaagctgccccagcccgaggccgttgtggctctgctgcagggcatgcagcctgatggggagggccctgtggctcccgggggctggcacaatggcccccacgcaccctgggctcctcgggcccagaaggaggaggaggaggaggaagagggtagtcctcaggaggaggaggaagaggaggaggaggaaaacagggctgaagaggaagaggccagcactgaggaggaggacaaggagggggccgtggtttctgcgccctctgtcaagggagtgtcgtttgaccaggccaataacctgctgatagagcctgctcgcattgaggaggaagagctgaccctcaccatcctgcggcagactgggggcctgggcatcagcattgcgggcggcaagggctccacaccctataagggggacgacgagggcatattcatctctcgggtgtccgaggaaggccctgcggcccgggctggagtccgtgtgggtgacaagctcctggaggtgaatggtgtggctctgcagggcgccgagcaccacgaggccgtggaggcgctccggggggccggcactgccgtgcagatgcgagtgtggcgggagcgcatggtggagcctgagaacgcggtcaccatcacgccgctgcggcccgaggatgattacagcccccgagagcggcggggaggggggctgcgcctgcccctgctcccgcctgagagccccgggcccctccgtcagcgccacgtggcctgcctggcacgcagcgagagggggctgggcttcagcattgctggtgggaaaggctccacaccctacagggctggtgatgcgggcatcttcgtctcccgcattgccgagggcggtgctgctcaccgcgcgggcacactgcaggttggcgaccgcgtcctctctattaatggagtggacgtgactgaggccaggcatgaccacgccgtctccctgctgaccgctgcctcccccaccatcgccctgctgttggagcgggaggctgggggccctcttcctcccagccctctgccacattcctcaccccccaccgctgctgttgccaccaccagcataaccactgccacccccggggtgcctgggttgccgagcctggcccccagcctgctggctgccgcgttggaagggccatacccagtggaggagatccgtctgccaagagctgggggccctctggggcttagtattgtcggaggctccgaccattccagccacccgtttggtgtccaggagcctggtgtgttcatctccaaggtgctcccgcggggcctggccgctcgcagcggcctgcgggttggggaccgcatcctggcagtgaacgggcaagacgtgcgggatgccacgcaccaagaagcagtcagtgccctgctccggccctgcctggagctgtcgctgctggtgcggagggacccggcacccccgggcctacgggaactgtgcatccagaaggcacctggggagaggctgggcatcagcatccgcgggggtgccaggggccacgctggcaacccccgcgaccccacagacgagggcatcttcatctccaaggtgagccccacgggggcagccgggcgcgacggtcggctgcgtgtgggtttgcggctgttggaggtgaaccagcagagcctgctgggcctgacgcacggcgaggcggtgcagctgctccgcagtgtgggcgacaccctcaccgtgctggtctgtgacggcttcgaggccagcaccgacgcagccctggaggtgtccccaggtgtcattgccaacccctttgcggcaggcatcggccaccggaacagcctggagagcatctcttccatcgaccgggagctgagccctgagggcccaggcaaggagaaggagctgcctggacagaccctgcactgggggcccgaggccacagaagccgcaggtcggggtctgcagcccctgaagctggactaccgcgccctggccgccgtgcccagcgctggcagcgtgcagagggtaccgtctggagcagctggagggaagatggctgaatctccctgctcccctagtggccagcagccgccctccccgccttctccggatgagctgcccgccaatgtgaagcaggcctacagggccttcgcggccgtgcccacttctcacccgcctgaggatgcccctgcccagccccccacgcctgggcctgcagcctccccggagcagctgtccttccgggagcggcagaagtactttgagctggaggtgcgcgtgccccaggccgagggcccccctaagcgcgtgtccctggtgggtgctgacgacctgcggaagatgcaggaggaggaagccagaaaactacagcagaagagagcgcagatgctgcgggaggcggcagaggctggggccgaagcgaggctcgccctggacggggagacgctgggcgaggaggaacaggaggatgagcagccaccctgggccagcccgagccccacctcaaggcagagcccggcgtcccccccgcccctgggaggtggcgccccggtgcggacggccaaagctgaacggcgccaccaggagcggctgcgcgtgcagagtccggagccaccggcacccgagcgtgccctgtcccctgccgagctccgggccctggaggccgagaagcgtgcgctgtggagggcagccaggatgaagtcattggaacaggacgctctccgagcacagatggtcctcagcaggtcccaggaaggccggggcacgcgggggcccctggagcgactggccgaggccccttcccctgcgcccaccccgtcgcccacccctgtggaagacctcggcccccagaccagcacctccccgggacgcctgtcaccggactttgctgaggagttgaggtccctggaaccatctcccagccctggcccgcaggaggaggatggagaagtggctctggtgcttctgggcaggccctcacccggcgctgtgggccctgaagatgtggcactgtgcagcagccgccgccccgtaaggcctgggcgccgtggcctgggccctgtgccctcctagaggagcaggcacctcccccagacttggggtgggggccctgccagctccagcaccacccttgccccaagtcttttaacctgggtgttagcattttaaagagaccccacaggagttctggcctgtgactaactaactgccccaccccagccgagacctcggcgagactgtaactagtgatgtttgtacaaccaaagactctattttgtggtttaaggagaataaagttgactacattttacctccaaaaaaaaaaaaaaaaaaaaaaaaaaaaaaaaaaaaaaaaaaaaaaaaaaaaaaaaaa

SEQ ID NO: 184 - DNA, 4271 bp, HOMO SAPIENS
gcctctgggtcagttacgcagctgtcttccaggtgactggatgtgttgatcagcgctcgctgggatttggctgacgtggccccagccccgcctccctccccaccccacaatggcagaagaaactggacagagtaaattagctgcagccaagaaaaagttcaaagaatattggcagagaaaccgccctggtgttccagcagcagcgaagaggaacacgaaagcaaatggcagtagccctgagacggccgcttctggtggttgccactcatctgaggcttcctcctccgcctcctcctctctgcatgcgcgtcagagcccgtgccaagaacaagcagcagtcctgaactcgaggtccataaaaatcagtcgactgaatgacaccatcaaatctttgaaacaacagaagaaacaagtggaacatcagctggaagaagaaaagaaagcaaacaatgagaaacagaaagctgaaagggagctagagggtcaaatccagagattgaacacagagaaaaagaaactaaatacggacctgtatcacatgaaacattctctcagatactttgaagaagagtccaaggatctggccggccgcctgcaacgttcatcgcagcgtataggagagttagagtggtctctctgtgctgtcgccgccacacagaagaagaagccggatgggttctcgagccgcagtaaagcacttctcaagcggcagttagagcagtccatacgggagcagatactgctgaaaggacacgtgacacagttgaaggagtcgcttaaagaagtccagctggagagagatcaatatgctgaacaaataaaaggagagagggcccagtggcagcagaggatgaggaaaatgtcgcaggaggtttgcacattgaaggaggagaagaagcatgatacgcatcgggtagaggagctggagaggagcttgtccagactcaaaaaccagatggctgagccactgcccccggatgccccagcagtgtcctctgaggtggagctgcaagacctgaggaaggagctggagagagtggcaggagagctccaggctcaggtggaaaacaatcagtgcatcagtctcctgaaccgtgggcaaaaggagaggcttcgcgagcaggaggagaggcttcaggagcagcaggagaggcttcgggaacgggagaagaggcttcagcagctggccgagccacagagcgacttggaggagctgaagcacgagaacaagagcgcactgcagttggagcagcaagtaaaggagctgcaggagaagctgggccaggtgatggagacgctcacctcggccgagaaggagccagaggcagcagtcccagcctcagggactgggggcgagtctagcggccttatggacctcctggaggagaaggcggacctgagggagcatgtggagaaactggaacttggattcatccagtaccggagagagagatgccatcagaaagtacatcgccttctaacagagccaggggacagtgccaaagatgcgtcaccgggaggaggccatcatcaggctggcccaggacaaggaggagaggaaggtgaagctgctggagctgcaggagatggtgttgcggcttgtggcagctacagcgaggggcacggcaaattcctggccgctgcccggaaccctgctgctgaacccagtccaggagccccagccccccaggagctcggggctgccgacaagcatggtgatctttgtgaggcgagcctcaccaacagcgtggagcctgcacaaggagaagccagggagggttcttcccaggacaaccctactgcacagccagtcctgcagctccttggtgagatgcaggaccaccaggagcacccaggcttgggcagcaactgctgtgtgccatgcttttgctgggcttggctgccgagaagaaggagataaacaccaccatcatcaaagagctgctcaagaaatttttaaaaacgaaacaaagttatggggttaatctcctacacaattcatttacttcatttgaatgttagagctactcatgattatttgtgtttctaatttatagtttaagtttatttgtaaaaagttaaaagagagtgggtctctgtgcctctcactgatgttcactctggcatcctttagcatttttcttttttcatttcataattgtaggtcattagcatgcatatcgagtttgcccttacgtggtgggagttcaaacacacaaagacccactctttgcacaaaactgttctcgctggtttggaataggctcccgtgcttttttaatgttattgcagcatggatgttcattacagaattcagataaaatttgctaatgttctgctatgatgtttgatctcatcttaatcacagtgagctcttccatagctcaatatgcggtttgccctcaagtgtgcactgtttattactttgtaatatgccactatgagtactgacacttagagctgtttaaaggccgagaactggaaacagcctttcctccattttctgtgtattggtgatgggagtgataaccttttgggggagctttctaaatctcgcagaagaggaaagtggcctgctctggcaggtatgtgcaggatacagtgtgtttcatctgttccggtgccaagaatgagcactgtactgtggcagttccctttggatttgtatgtgctctgggctcatgaagatattgcatcgtgagctgcagcagttgcactctttttcagtgacctaaaaatggcttatttccgaggaatgaaaggctgccatcgttggctgtggatgtggaaaacctttcctagcttagagcatttgtatctacaatacattttaaagtcagagttcgtgttccctgttttaatcacatgactacctgtcccagtacacgaaagggcgctggttggcattcttcttaatgtatttagtaaagatcataagacatcctttaagagtttaaatgtctctgaaacaggcatacaggctctagtcaagaatgaattagagtgaaggaaagctgtgtgacacctggcattcctctctgttcatggagcttctttgaggcttgaagtttgattttactatctagacctctctggctaatacctattcttcaaccacctcggttactctgacataggaatttacttcttttccttgagtggaaaacactttagaaaataataacaaacattattataaactaatatatgtgagagtacttagttgaaacaaaaaggaattttagtagacagtattatattatctttgaaaatcaaggagaagtttatgcaactgaaaatgtttacacactgtgctgcaatctactgtttgtgaatgtcaatgtattatcaggaaacatgtctatacgatcgcagagttgtatttcctcacaaacttctttacgaagagtgaaatatgtttttgtacctctcagtttcagtcagggacatattttgtgcaatatttctgtgattgtgcctatgcgtgatgagtgaatgcatttcaatcatacattgcctaaatcataacttgatgatgcttgggaaagaatcaacagttaaaacttcatgaagttctaatgtctgtgttccaaaacacatcacattattaggttgtagggagatatgtatgtgtgctccctggggtggggagttttctagttactagaccatctccatttttagcacttggcagcctcatgatccttttataaataggagattaacaggagagcagcaatacgattttgccaatggaataacagatttgccggcattcactgaaagagggcagatattgggtccttgtgacttcaactgactcttccgaattgtatgaatttatcaatgtattagataaacccagtttcagaataataaagaaaaaatattagaccaaataatgtggctaatagtggtatgatttctagcccgtgggtttaaaactgtatcctaaagagtcattttaaaataatataaatatttaaaagtgtaactgctatctttatgttctgaaataagttaaaacattttaaaatatgaatactgtagtttaaaagaaagaaatggtgggaaggaaaagtagagaaagaaatgccaattccagtccaaagctttgtttgccaagttttcttagaatgaattttaccaatgtatgggttcttgttaacagaatgtgtaacagaaatactgaaagacttttgcctaaagtggcattattgactgctggtgtgatgctactgtaatgtgataaattattaaattgttgcaaa

SEQ ID NO: 185 - DNA, 739 bp, HOMO SAPIENS
cgtggcgcagcgactcggaggttcgcctccagcttgcgcatcatctgcggccgggtcccgatgagcctcctgttgcctccgctggcgctgctgctgcttctcgcggcgcttgtggccccagccacagccgccactgcctaccggccggactggaaccgtctgagcggcctaacccgcgcccgggtagagacctgcgggggatgacagctgaaccgcctaaaggaggtgaaggctttcgtcacgcaggacattccattctatcacaacctggtgatgaaacacctccctggggccgaccctgagctcgtgctgctgggccgccgctacgaggaactagagcgcatcccactcagtgaaatgacccgcgaagagatcaatgcgctagtgcaggagctcggcttctaccgcaaggcggcgcccgacgcgcaggtgccccccgagtacgtgtgggcgcccgcgaagcccccagaggaaacttcggaccacgctgacctgtaggtccgggggcgcggcggagctgggacctacctgcctgagtcctggagacagaatgaagcgctcagcatcccgggaatacttctcttgctgagagccgatgcccgtccccgggccagcagggatggggttggggaggttctcccaaccccactttcttccttccccagctccactaaattccctcctgccttaaaaaaaaaaaaaaaaaaaaaaaaaaaaaaaaaaaaaaaaaaaaaaaaaa

SEQ ID NO: 186 - DNA, 1470 bp, HOMO SAPIENS
agagccgccagcgaggctggggatgggggcgccgctgctctctcccggctggggagccggggctgccggccggcgctggtggatgctgctggcgcccctgctgccggcgctgctgctggtgcggcccgcgggggccctggtggaggggctctactgcggcacgcgggactgctacgaggtgctgggcgtgagccgctcggcgggcaaggcggagatcgcgcgggcctaccgccagctggcccggcgctaccaccctgaccgctaccggccccagcccggagacgagggccccgggcggacgccgcagagcgccgaggaggctttcctgctggtggcaaccgcctacgagacactcaaggtctctcaggcagctgcagagcttcaacagtactgtatgcagaatgcctgcaaggatgccctgctggtgggtgttccagctggaagtaaccccttccgggagcctagatcctgtgctttactctgaagactcgagagaagtttgctgaggaatgccttcaagcacaaagtgatgaatgactgccttcaagtctcaagaaaacacttttccctaacttttagagatatttcagccctttcctgtggcctggtcctatagccaaaatcacagatattcatgagtttctacttgagtgagaaaactgggtgaaggaatagaattttaaatagtaataactgcttgttttttttgtgcaagtacttttatacataagataaacaaaaaccttaccaccaaacataccaaaatgcacctctttcataagtgagttactaagatttctatacctggaatatcatgtatgtttcatttactggatgtttacattttaggaaggaaaatagttttgtttatttaaacaactgaatacttataaactgttgttcctggaagttatttattccataaaaaatttgttcttttgtcatgaatttataattcctaaatgaagaccagaaagtacaaattgctgggaggaagaataggctttattaatcaactgatgtcttgatttttctaaatgggaagattgctttatttttaacactaattatgggagcagattcttagcaaacttctttggaaaagttaatgttatgatgtgcattaggctgccccatcgtgtatataaatgaagcagatttgatttttgtattcttacgtttctctgctttgtagttgtggctgtacttaaagaaatacagaatttcatatatttaaaaatgtttaaaatgtgacccacagaacattgtaaatgattaaaaactaacatgaaaatattacaacctaaaagaattcttaacttcacaagtgttttacttcgacgatgtgcctttgatttaatttgggacacttttttagaaggatacattattcgtgtttgcaacggtctttgaagagcttggaaataaaatttctgcttaattaatcaaaaaaaaaaaaaaaaaaaaaaa

SEQ ID NO: 187 - DNA, 5378 bp, HOMO SAPIENS
acttccgcgggcgcgtgcgcagtggcgggccgggcgcgtgcgcagcgccggcttcttcccagcgcgagttgctgctaacgctcctcctccagcttcccacccccgccgcccgccgcggcccggtaccaacgggtggtctcgccgagggagctgtcgtgcctcgtggtcccgggactgcagtggtgtgcgctctcggcgcgtggcgctaggcatggcgatggatcaagtaaacgcgctgtgcgagcagctggtgaaagcggtgacggtcatgatggaccccaactccacccagcgctaccggctggaagccctcaagttttgtgaggagtttaaagaaaagtgtcctatctgtgtcccctgtggcttgaggttggctgagaaaacacaagttgccatcgtcagacattttggccttcagatcctggaacacgttgtcaagtttcggtggaacggcatgtctcgattggagaaggtgtatctgaagaacagtgtcatggagctgattgcaaatggaacattgaacattttggaagaggagaaccatattaaagatgctctgtctcgaattgtagtggaaatgatcaagcgagagtggccacagcattggcctgacatgctaatagaattggacactctttccaaacaaggggaaacacagacagaattggtgatgtttatccttttgcgactggcagaggatgtagtgacttttcagacacttccccctcaaagaagaagggacatccagcaaacattaacccagaacatggaaaggatcttcagttttctgcttaacacacttcaagaaaatgtaaacaagtatcagcaagtgaagacagatacttctcaggagtcaaaggcgcaagcaaactgtcgagtaggagttgcagcactgaatactctagcaggctatattgactgggtgtctatgagtcacatcactgctgaaaactgtaaactcctggagatactgtgtttgctgttgaatgaacaggaacttcagttgggagccgctgagtgtcttctcattgcagtcagcagaaaaggcaagttggaagaccggaagcccttgatggtcttatttggagatgttgccatgcattatatactctccgccgcacagactgctgatggaggaggtttggtagaaaaacactacgtctttctgaagaggctctgtcaggtgttgtgtgcgctgggcaatcagctgtgtgcattgctgggtgcagattctgatgtagaaacaccatcaaactttggaaaatacctggaatcttttcttgctttcacaacccatccaagtcagtttctacgctcttcaactcagatgacttggggagccctcttcaggcatgaaatcctgtcccgtgatcctttgctattagcaataataccaaaatatcttcgtgcttccatgactaacttggtcaagatgggctttccttctaaaacagacagccctagctgtgaatattctcggtttgattttgatagcgatgaggacttcaatgctttcttcaactcctcccgagcacaacaaggagaggtgatgaggttggcatgtcgtttggatcccaaaactagcttccagatggctggggagtggctaaagtatcaactatcaacttttcttgatgctggttctgtgaattcttgttctgcagttggaactggagaaggaagcctctgttccgtcttctcaccttcattcgtgcagtgggaagccatgactctttttttggaaagtgttatcacccagatgtttcgaacactaaatagagaagaaattcctgttaatgatggaatagagctattgcagatggttctgaactttgataccaaggatcccctcatcctgtcctgcgtccttactaatgtctctgcactctttccatttgtcacctacagaccagagttcctgccccaggtcttctctaagctattttcatctgtcacttttgaaactgttgaagaaagtaaggcccccagaacccgggcagtgaggaatgtgaggaggcatgcttgttcctccatcatcaagatgtgtcgtgactacccccagcttgtgctgcccaattttgacatgctttataaccatgtgaagcaactcctctccaatgagctactcctgacacaaatggagaagtgtgccctcatggaagccctggttctcattagcaaccaatttaagaactacgagcgtcagaaggtgttcctagaggagctgatggcaccagtggccagcatctggctttctcaagacatgcacagagtgctgtcagatgttgatgctttcattgcgtatgtgggtacagatcagaagagctgtgacccaggcctggaggatccgtgtggcttaaaccgtgcacgaatgagcttttgtgtatacagcattctgggtgtggtgaaacgaacttgctggcccactgacctagaagaggccaaagctgggggatttgtggtgggttatacatccagtggaaatccaatcttccgtaacccctgcacagagcagattctgaaacttcttgacaatttgcttgcgcttataagaacccacaatacattatatgcaccagaaatgctagccaaaatggcagagcctttcaccaaggctctggatatgcttgacgcggaaaaatctgctatattaggattacctcaacctctcttggaactcaatgactctcctgtcttcaaaaccgtcttggaaagaatgcagcgtttcttctctaccctctatgaaaactgttttcatatcctagggaaggcaggcccttccatgcagcaagacttctatactgtggaggaccttgctacccagcttctcagctcagcctttgtcaacttgaacaatattcctgactaccgactcagacccatgcttcgtgtctttgtaaagcctctggtgctcttctgtcccccagagcactatgaagccctggtatcccccatcctcggacctcttttcacctacctccatatgaggctttctcagaaatggcaagttatcaaccaaaggagcctgctgtgtggagaagatgaggctgcagatgaaaacccagagtctcaagagatgctggaggagcaactggtgaggatgttaacccgagaagtcatggacctaatcacggtttgctgtgtttcaaagaagggtgctgaccacagtagtgctcccccagcagatggagacgatgaagaaatgatggccacagaggtcaccccctcagctatggcagagcttacagacctgggcaaatgtctgatgaagcatgaggatgtttgtacagcgctattaattacagccttcaattccctggcctggaaagatactctgtcctgccagaggacaacctcacagctctgctggcctctcctcaaacaagtgctgtcagggacactgctcgcagatgcagttacgtggcttttcaccagtgtgctgaaaggcttacagatgcacgggcagcacgacgggtgcatggcttccctggtccatctggccttccagatatacgaggcactgcgccccaggtacctggagataagagctgtaatggagcaaatccctgaaatacagaaggactcactggaccagtttgactgcaagcttttaaacccctccctgcagaaagtggctgacaagcgccgaaaggaccaattcaaacgcctcattgctggttgcattgggaaacccttgggagagcagttccgaaaagaagttcacattaagaatcttccctcacttttcaaaaaaacaaagccaatgctggagacggaggtgctggacaatgatgggggtggcctggccaccatctttgaaccctgaatcaagcttttgggcatccttcctcggcctttcttgtcatctcttctttccctttgtagccgatctctaggcccttcttgcactgccacctcactttccaccactgtcagcctggaaagagatccaggtctggagctggagagaacaggccctgtgcaggaccagaagtaattatactaaagtatcaagaaagggagttagggcttaaactattctgtctagatgtcccagatagttcccattctacttggagatttggcttttccaagaaaagctagagcagagcagcccttctcccacaagccctcccacccccgtgcagccacatacctgtacagaatggtaactaagggtgctgtgcccaaccctgcgactagcaaggctcgcagcaagagcacagccctcaactacttgtgccagagtttctcttggaccactccaactcccactgagcccttttgctgctgggctggcaggaaactttccccactccctaaggggcatgtctgggttaggtgctaagtgctgaagagaacttggtcagttctctcaactttgctttgggcaagaatctggtcacctgatgggatccatggtacaggctactgctaaacttggcacagtatcaagtatagtacctccaaggaccagggctgggaagtctttagtgctaacatcccctttagagttcacacatcttgcccttccatgaatgacccctcagtctggcctccccagcctcaaggtccactcaggcacaagagccacagtaccctagatagtgtcacatgacaccgttgtcatccaaggataatacagaccaactaggctacatctgtgatgagcagctagcaaagccgctggtcttctcctaggactaagtccaggtgccttccacaatctcatggtctttcaggtccctggttacttttctcaaaggccatttccaaaagaatacatgccttcacatcacaacctgtactgtgagtccattctagaggtcactgaaaggccctgtaaagagaggacatggatacgggacctggccctgaggttattactggccgtaaggcagagttaatccatacagaaaccagtgtgtccatgtgctctgcacaaaaacagacctgttgtccatccagtccactgacaagagggtttccccgagagccgaagtggactgaagctacagtttttagctggtgcgggccacaggcagggtcagattgagaagaagcaaagctggggaagcagaagttgggagtcttgtgttgctccctcttcctgtgtggtgctctgggtttctgtggatcgtgaaggcgatctcaagagtgtttccctccaaacctgatagctgcctattcctgtctggttggggctgtggaggatgtagttgtatttattgcattgtaatatttttaacatcctgtgacttcatgctagaaattttctattgtttatagaaactttttgtagaaacattaactctaaagcacatctgcatgtcagtaaaaatctcagtttcgtacagaaagggaaaaaaaaaaaaaaa

SEQ ID NO: 188 - DNA, 608 bp, HOMO SAPIENS
gaggatcatagagctgtctggcgcagcgaggcctcccggcgccaccgagacgcgcagaggacggctagagcgttgctcgccgagagacttcctcttcgttaagtcggccttcccaacatggcgcagtctattaacatcacggagctgaatctgccgcagctagaaatgctcaagaaccagctggaccagatgtatgtccctgggaagctgcatgatgtggaacacgtgctcatcgatgtgggaactgggtactatgtagagaagacagctgaggatgccaaggacttcttcaagaggaagatagattttctaaccaagcagatggagaaaatccaaccagctcttcaggagaagcacgccatgaaacaggccgtcatggaaatgatgagtcagaagattcagcagctcacagccctgggggcagctcaggctactgctaaggcctgagagtttttgcagaaatggggcagagggacaccctttgggcgtggcttcctggtgatgggaagggtcttgtgttttaatgccaataaatgtgccagctgggcagaaaaaaaaaaaaaaaaaaaaaaaaaaaaaaaaaaaaaaaaaaaaaaaaaaaaaaaaaa

SEQ ID NO: 189 - DNA, 1888 bp, HOMO SAPIENS
ctacgatgacgtcagcgcggcgcagtagcggctgtgactagcgggccggcccgggccaggacagcgggcggcgggcggcgcgggcctggccccgggatggctatgttccgcagcctggtggcctcggctcagcagcggcagccgccggccgggccggcgggcggcgacagcggcctggaggcgcagtacacctgccccatctgcctggaggtctatcaccggcccgtggccatcggcagctgcggccacacgttctgcggggagtgtctccagccctgcctgcaggtgccatccccgctgtgcccactctgccgcctgcccttcgaccccaagaaggtggacaaggccacccacgtggagaagcagctctcatcctacaaagcgccctgtcgaggctgcaacaaaaaggtgaccctggcaaagatgagagtgcacatttcgtcctgcctgaaggtccaggagcagatggccaactgccccaagttcgtccccgtggtgcccacatcacagcctatccccagcaacatccccaacaggtccaccttcgcctgcccgtactgtggtgcccgcaacctggaccagcaggagctggtgaagcactgtgtggaaagccaccgcagcgaccccaaccgcgtggtgtgccccatctgctcggcaatgccctggggggaccccagctacaagagcgccaacttcctgcagcacctgcttcaccgacacaagttctcctacgacacctttgtggactacagtattgacgaggaggccgccttccaggctgctctggccctgtctctctctgagaactgaagggaagcgcagccacccgcctgcgtctggggtcagggatgtccccgctcctgtgtcgcacctggcacctgctcgggagcgcacctcaccggactgagctcacaggaggagcctgcacccgcgcagaaggggagccggggccgagcctccgggcctgaatacgggccagccgccgaggccgccagagcagggccgcctggtcccaccggcgtcgctgggttcttcggtgcttctggccgagcaggcggcctacttgggcagggctggacgctgggacctggagctgccgccgtctcttcaaagccatgataccccctcgtgggaagaagggaccgacgcgcgagtcgcgctccgcagtcgagccgggaggaacccaggctgctgccctgcccagcccgaccctgccccggccccgcttccaccttgcgcatttggtactggcttttgtgatacttaggaaccctggcatcttttctatattatccagtgtgataatcttttcacgttttatagagcaaagacagagcagttactcttcatattgcaatatctgtgtttgactaggaataatagtatttttatggaacatttacaaaattatattttttaagaaaacaatcaaaacaagcattgggggattggggcaaggatggaaggagcagtggggcagctgccagagctcaggcgagccatggggtctgctgtggggtctgccctggccacccactgtgtgtctgggtccttgaggtttgtacgtttctctttgatgaccaggaagaaatcccagcaccccagccacaggctgtggctgctcccagcagaggcggggccggcagagaaggggcctcctccacccagagtcctggccttggcccgctgtcaccttcaaagctgactgtgccccgctgcgggaggggacggcaccccagtggtggcagagcttgggggcctgggcaggggcccgcttggcgggccgggcaacacgtcaacattcttttctgttcttggcattaattattgctgtcttttttttaaaaaaaaaagtttaaataaaatgtctcagagcatctctaaaaaa

SEQ ID NO: 190 - DNA, 7551 bp, HOMO SAPIENS
gagccggcggcgggaggagctagggctggagcctctccagcctcccgcgaaggtttgagcacaaaatgaacataattagggaaaataaggatctggcatgtttctacacaacaaaacattcatggagggggaagtataagcgtgtcttttcagttggaactcatgcgattactacatataatcccaataccttagaagtaacaaatcagtggccttatggagacatttgcagcatcagccctgttggaaaaggacaaggaacggagttcaacctcacatttcgtaaaggcagtggaaaaaagtcagaaactttaaaattttctacagagcacagaacagaacttcttacagaagcattgagatttagaactgatttttcagagggaaaaatcacaggaaggagatacaactgctataagcatcactggagtgactcaagaaaacctgtaattttggaagtaactccaggaggctttgaccaaattaatcctgcaaccaacagagtactctgttcctatgactatagaaatattgaaggatttgtagatctctcagattatcaaggaggattttgtatactttatggaggatttagtagattgcatttatttgcgtcagagcaaagagaagagattattaaaagtgcaatagaccatgctggtaactacataggtatttcattgcggatcaggaaagagcctttagaattcgagcaatatttgaatcttcgctttggaaaatacagcactgatgaatccatcacatctttagcagagtttgtagtccaaaaaatatcacctagacattcggagcctgttaaaagagttctagcacttacagaaacatgtttagtagaacgtgatccggcaacctataatattgcaacattgaagcctttaggagaagtatttgcgttggtctgtgactcagaaaatccacaactttttaccattgaatttataaaagggcaagtacggaaatattcttcaacagagagagattccttattagcaagtttgctggatggagtaagagcctctggtaatagagatgtttgtgtaaaaatgacaccaacccataaaggtcagcgatgggggttactcagcatgcctgttgatgaggaagtagagagccttcacctcaggttcttagctacgcctccaaatggcaactttgcagatgctgtattcaggttcaatgctaatatttcatacagtggagtcctacatgcagtaacacaagatggtctcttctcagaaaacaaagaaaaactgatcaataatgccataacagcattactgtcccaagaaggggatgtcgttgcttcaaatgcggaacttgagagtcagttccaggctgtgaggaggcttgtggcatccaaagctggtttcctggctttcactcagcttccaaagtttcgcgagcgtctaggggtgaaggtagtaaaagcactcaaaagaagcaacaacggaataatccatgcagcagttgatatgctttgtgcccttatgtgtcccatgcatgatgactatgacttaagacaagaacagttgaacaaagcttctcttctctcgtcaaagaagtttctggaaaacttactggagaaatttaattcccatgtggatcatgggactggtgccctagttattagttcgctcttggacttccttacctttgccctctgtgctccatatagtgagacaactgaagggcagcagtttgatatgctcttggagatggtagcatccaatggaagaaccctttttaaactttttcagcatccttccatggcaataataaaaggagctgggttggttatgaaggcaataatagaggaaggtgataaagaaattgctacaaaaatgcaggagcttgccctaagtgaaggtgccttacctcgacacttgcatactgcgatgtttacaataagctcagatcaaaggatgcttacaaatagacagctaagtagacatttagtgggactctggacagctgataatgcaactgcaacaaacttgttgaaacgcattttgccgccaggcttgctggcatacttggaaagctcagatctcgtacctgagaaggatgctgatcggatgcatgttagagacaatgtgaaaatagcaatggatcagtatggaaaatttaataaagttccagagtggcaaagactagctggaaaagctgctaaagaagttgaaaaatttgccaaagaaaaagtggatcttgtattgatgcactggagggataggatgggcattgctcaaaaagagaatataaatcagaagccagtggttcttcgaaagagaagacaaagaataaaaatagaagcaaattgggatctcttctattataggtttggtcaagaccatgccaggtcaaaccttatttggaatttcaaaacacgagaagaactgaaagatactcttgaatctgaaatgagagcatttaatattgacagagaacttggaagtgcaaatgtgatctcctggaaccaccatgagtttgaggttaaatatgagtgcctggcagaggaaattaaaataggagactattacctgagattactattggaggaagatgagaatgaagaaagtggatcaattaagagatcgtatgaatttttcaatgagctttatcatcgcttcttgctcaccccaaaagtaaacatgaagtgtttatgtttacaagcccttgctattgtttatggcagatgtcacgaagaaataggaccttttacagataccagatatatcattggaatgttagagaggtgcacagataaacttgaacgagataggttgattctcttccttaacaagttgatccttaataagaaaaatgttaaggatctcatggattcaaatggaataagaatccttgtggacttgcttacccttgcacatctccatgtaagccgagctacagtaccactgcaaagcaatgtaattgaagctgctccagatatgaaaagagagagtgaaaaggaatggtattttggcaacgcagacaaagaaaggagtggcccgtatggatttcatgagatgcaagaattgtggaccaaaggaatgttaaatgcaaaaaccagatgctgggctcaaggcatggatggatggcgaccacttcagtccataccccagcttaagtggtgtctcttagccagtggacaggctgtcctgaatgaaactgaccttgctacccttatattgaacatgttgatcacaatgtgtggatattttccaagcagggatcaagacaatgccatcattcggcctctacccaaagtgaaaagactgctgtcagatagcacttgccttccccatattattcagctactgctgacctttgaccctatccttgttgagaaggttgctattttgttataccatatcatgcaagataacccacagttaccccgcctttatctgagtggagtatttttctttatcatgatgtacacaggttccaatgtgcttcctgttgctcgatttttgaaatacacacataccaaacaggctttcaagtcagaagagacaaaaggacaagatatttttcagagaagtatacttgggcacattctacctgaagcaatggtttgttacttagaaaattatgaacctgaaaagttttctgagatttttctaggagaatttgatactccagaagcaatctggagcagtgaaatgaggcgcctgatgatagagaagattgctgcccatctcgcggatttcacacctcgtcttcagagtaacacaagagcactttatcagtattgccccattcctataatcaactatccacaactcgaaaatgaactattttgtaatatttattacctcaaacaactgtgtgatacactccggtttccagattggccaattaaagacccggttaagcttctaaaagatacccttgatgcctggaagaaagaagtagaaaagaagccacctatgatgtcaatagatgatgcttatgaagtgcttaatctgcctcaaggacagggaccgcatgatgagagcaagattaggaaagcttacttcagacttgcacaaaagtaccaccctgataagaatccagaagggagggacatgtttgaaaaagtaaataaagcatatgaatttttatgtaccaaatcagcaaaaatagtggatgggccagatccagagaatataattttaattctaaaaacacagagcatcctcttcaaccgtcataaagaagatttacagccttataaatatgcaggataccccatgcttattcggactataacaatggaaacttcagatgacctccttttctcaaaagaatcaccattgttgcctgcggctacagagctagctttccatactgtcaactgttcagccctcaatgctgaagagctcagaagagagaatggactagaggtgttacaagaggcatttagtcgctgtgtggctgtcttgactcgtgctagtaaaccaagtgacatgtcagtacaggtgtgtggatacataagtaaatgctacagtgtggctgctcagtttgaggaatgccgagagaagatcacggaaatgcctagcatcatcaaggatctctgtcgggtactatattttggcaagagtattccccgcgtagctgctcttggggtagaatgtgtcagttcttttgctgtggatttctggctacagacacacctatttcaggctggaattttgtggtatctccttggttttctgtttaattatgactacacactagaagagagtggcattcagaaaagtgaagaaacaaaccagcaggaggtagcaaacagccttgccaaactgagtgtccatgctctgagtcgccttggagggtatttggctgaagaacaagcaactccagaaaatccaaccataaggaaaagcttagctggcatgctgacaccctatgttgctagaaaacttgctgtggctagtgtgactgagattttgaagatgcttaacagcaacacagaaagtccatatttgatatggaacaattctacaagagcagaattacttgaatttcttgaatcccaacaagaaaacatgattaaaaaaggtgattgtgacaaaacttatggatcagaatttgtctacagtgatcatgccaaagaacttattgtaggggagatttttgttagggtgtataatgaagttcctactttccaactggaggttccaaaagcatttgctgcaagtctcttggattatataggctcgcaggcccaatacttgcacacattcatggccatcacacacgcggcaaaagtggagtcagagcaacatggagatcgcttaccgagagtagaaatggctttggaggctctgagaaatgtcataaaatacaatccaggttctgagagtgaatgcattgggcactttaagttgatattttctcttctccgagttcatggagctggtcaagtgcagcagttggctttagaggttgtgaatatagtgacatctaaccaagactgtgtcaacaatattgctgaatcaatggttttgtccagtttattggctcttctacattcattgccatcaagtcgtcagcttgttctggaaactctttatgctttgacatcgagtacaaaaataatcaaagaagcaatggcaaagggtgctttgatctatttactggatatgttctgcaattcaacacatccacaggttcgagcccaaacagcagaactttttgccaaaatgacagcagataaactgataggtccaaaggttcgaattacgttaatgaaatttctaccaagcgttttcatggatgctatgagagacaatcctgaagctgctgtacatatttttgaaggaactcatgaaaatcctgagttaatttggaatgataattccagagataaagtgtccacaacagttagggaaatgatgctagagcactttaaaaatcagcaggacaaccctgaggcaaactggaagttgcctgaagattttgctgtggtgtttggagaagcagagggtgaacttgctgttggaggagtcttcttgaggatctttattgcacaaccagcctgggttctaagaaagcctagagaatttcttattgccctgttagaaaaattaactgagctcctagagaagaacaatcctcatggagaaactctggaaaccttgacaatggcaacagtgtgtctcttcagcgcacaacctcagctggcagatcaggtcccgccattgggccatcttcccaaagttatccaggcaatgaatcataggaacaatgccattcctaagagtgccattcgggttatccatgccttgtctgaaaatgagctgtgtgttcgagccatggcatctttagagaccattggcccactgatgaatggaatgaaaaagcgagcagatactgttggtctagcctgtgaagcaattaatcgaatgtttcagaaggagcagagtgaattagtagcacaagccctgaaagcagatttggttccatacctcttaaaattactcgaaggcattggccttgaaaacctggacagcccagcagccactaaggctcagattgttaaagctctcaaggcaatgactcgaagtttgcagtatggagaacaggtgaatgaaatcctgtgccgttcttcagtctggagtgccttcaaagatcagaaacatgatttgttcatttctgagtcacaaacagcaggatacctcacaggacctggagttgctggctaccttaccgcaggtacatctacatcagtcatgtctaacctgccacctcctgtagaccatgaggcaggcgaccttggctatcagacttgaaatattcacgagagacaataaacgctgaaaggccagtgccaagtccacattcctccagctgatacgttgaagcaaactcttactgcctttctcctggtttcatgacagtgttattcctttttctataaatatatttttaggaaaaaaagtcagtgatcctaattgtatcacattataagaaagcactctgtggatcaacataagtgggtacacaagaattttttttttcttggtgtatgtaagcacatttgttcctttatatctgtttacaaaactgtgaatcaaaaagacaaaactttcttcctagtttttgtaattttttttttgaactagcatgactgtagggttgagctacagtcaacaaaaattgggctaagtcacttttccccaggaaagaatatttccctctcctgcatcaagtctgcgtggccatcctccccccaccatccaagactattaggttttgtccctgcacccttcactggcatcctcaatcattaaccttctgaaagctcacagtacacattagtatgtataactggctttaccaaattgaatgaaaaggagcttgtgcaaaaaaatttaaaaatggatgtcaagatgttatgtaaaagatgagtgtaattgtgaaatgttctatacactatcaaatatataaagctttctatattgaatgtacattatacagatcattcatatgtgtacataaaattttaaaaataaagggaattgactgctttgttaatgagaaaaa

SEQ ID NO: 191 - DNA, 4261 bp, HOMO SAPIENS
ggagacgttggcggcagaggcggaggcggacggggtcagcccaaagcagaggctcggccatgaacttacccgggacagcggcggcggcggaccttttggccatcttctcgcagagtgctccctgctaacggggacagattttaacattatggcagggaggcatcagaatcgtagttttcctcttccaggagttcagtcaagtggtcaagtacatgcatttggaaattgttcagacagtgatattttggaggaggatgctgaagtgtatgaacttcgatccagaggaaaagagaaagtccgaagaagtacatcaagagatagacttgacgacattatagtattaacaaaagatatacaagaaggagatacattaaatgcaatagcccttcagtactgttgtacggtagcagatatcaagagagttaacaatctcatcagtgatcaagacttttttgcccttaggtctatcaaaattccagtaaaaaagttcagttccttgaccgaaacactttgtcctccaaaaggaagacagacttcacgtcattcatctgttcaatactcttccgaacaacaggaaattttgccagctaatgattctcttgcttacagtgactcagctggtagctttttaaaagaagtagaccgagacatagaacaaatagtaaagtgtacagacaataagagagagaacctcaatgaggtagtatcggccttaacagcacaacaaatgcgttttgaacctgataacaaaaacactcaacgtaaagacccctattatggagcagactggggaatagggtggtggacagctgtagtgataatgttgatagtaggtataataacaccagtgttttatttgttgtattatgaaattttagctaaggtggatgttagtcatcattcaacagtggactcttcacatttacattcaaaaatcacacccccatcacagcagagagaaatggaaaatggaattgtgccaactaaaggaatacatttcagccaacaagatgatcataaactgtatagtcaagattctcagtcacctgctgctcaacaggaaacatagcaattagctcataatcaaatgttagtggtcacatgtgcatctggaatgtggtgaatcagttatatccaataatagcttcaaaggcagaatttagagagattgaggatgcttttgtttttaacaaaagggtttcacactttgaaaattttttgagcaactagttgttgatgttgagagcagttgatccataaatctggtgtgtgaatgtttcaagcagaaattaatttaaatgtgtgtttaggaagtacttaacttggaagatgtatcatttttcttaaaatgcatgtttaaattttatttttttaagtaatttttaaaaagtttattaatgttaaatttatgatgcagaatgatagcatcagatgtctgcagctgaaaaaaatttactactatgaacccccaaaatattcagttgcaagaaaatttgattctaaaattattcatggtaggatacgtaacacaccccttcaaaacttttaaaaaatacatttagcacatgtgctatgaaagcatacgtacaaagagaaaggggaaagtgatttataattcctacaacagaggccaagaaatagattaaaatattttcaagaccccaaaataatgtattatggttgggaagtcagtagaacactggaataggtgaagacctgacagtaatttttgtcttaagaatgctttctttaggacagaccctttaacctcacctctgtgcatctgtttttaaaatgattatatttgcctctgatatttgaaagcacttttgtagttttgatgatgaaaaatatattaaacgtgcatattaccattatttaggaaataattccttatatactgtgataaatcattgctgttacatacagtaacatgccttaattacatttaatgccttactgctttatgtaagtaaatccaagtttcagaattaaaaataagcattatttcatatggtccaatcagattcgttacataggctatataaatttgtctccattttcaccatcaagcacaaataattgggtcaaaactgcctttgaggtctgttgaagaaaatggttcattaagcaaaaaagagtagaggtattttatattagcagtaacagacaaattatttagtaatcccttaacctctgtttttcaaagagaaaatatccaatttagacttttttcctgatctctatatatagcatcaaattgggaaacaaaggccaaaggtgtatagattgcttgaaagggggtggtagtgcctctttttaagatctgttgagtcggctacagtctggctaagtaagaagcatttgcatactgattccatcatttaatctttaaaagtatgtgttttaaaaatgtaaccagaatgattcttcaatagaaatgagatttggtggagtctggattgcctgttttgtatataatatatacttaagatatataataccacctcattttctgggcattatttcctaattgttgatgtttcaggcttttgataagtcattttatatatttcaaatttaactcagaataagtaaatatttatggcaaatgcagttttatgtactttcaggagaagaccatcaggaaaagacaggacaaagaagtcaaacattaaagcccttgcaaatattagaggaccttagacaattaccaaaaagtgtttaatagggaagttgcaaatgattctcttagtaaattaaacatttaaaaagtagttttaatgtgccttgggcatcttgaaaagaagagtgtgatataatttatgcttagtgttaactggtcattttacattgtatttattaagtctgctgaaaaatgaggttttaaggaagaaaatgcagattattttagggtaaacaggccaggtgtcctttgaagaactttgtttacatcaaattgatgaaattacagtcagtgattccttactttttttgctagttgtactttgaaattgttatgggttcgatttccaaaatatgtaacttattttttaaaggaataaggtgtgctgtgtatttgttgattaaaaatcatttgtcttgcagagtatccttttttgaaggaaatatacatccttataacacatcaggtagttttcttttttctgtatttaaattatatatttgaattaattgaatataatttgagttacatataattctatataaaggttacatattgaattatggttctaatctgtttaggaaagaaatgaattttctaagcatttaatacatttggaataattttagtttctaaaaagtactaatgtaagttaagtttatatcaaatgcaaattaccttgtataactaacaagcacagttattgtttaacattatggattttaattgtgttgacacccttctttgaatttgttgctttacatgtgtgtctgtgtgtgtgtctgcatgtgtgcacgcatgtacttgtatgcaatgtaaaagtaacagcagaatcattgcatttggtttacttaaaattttggagttagcaagtaaacaaaaagctgatagttttatgaagtctcggttaaaataaaatttctttgctatctcactcctaggaagttatggagttcatattttcaaaagatatgttaaaaatggttacacactctgctggccacattaaaaattagaagactcatgttaaattatctcctccaaaggactttttatttacagcttttcttttcctggactctacctgcttggttcagtgtcctgaagagttatttaaatgaaccactacttagtaattagttcttttttaaagtatctacttctaaaattacctagttgaaaatatgaaggatatgcttagttttagaaatatcatgaagcaaggatctagtcagtgttacagggtaaaggtggagttttttaaagtctgtatttaaatggtgcactgatggattcatttttaatttgcattacaaaaatgttgctcaggtaatcagtattttcttccacgtatgtgcatattgcactgttagatcatagaaatatctgaatgctttaatttttatgtatgcaaaatctataaatcttttgtataatgtattttatacaaatgtaactgtagaacattgttagcatgtgtatctgtaaaaccagtttttaaaattttttgccccttatttttcatattttgaaagatctccaacatgtaataaagtttctcttattcaatctaaa

SEQ ID NO: 192 - DNA, 1060 bp, HOMO SAPIENS
gcagcggcgcttcctggtggtcagggcgccatggcgctgtcctggctgcagcgcgtcgagcttgcgctctttgctgccgccttcctgtgcggggccgtggcggccgcggcgatgactcggacccagggctccttcagtggtagatgtcccctgtatggtgtggccaccctgaatggctcctccctggccttatcccgtccctcagcaccatccctgtgctactttgtagctggggcctctggcctcttggccctctactgcctcctgcttttgctcttctggatctacagcagctgcatcgaggactcccacagaggtgctatagggctgcgcattgcactggccatctcagctatagccgtcttcctggtcttggtgtctgcctgtatccttcgatttggcaccaggtctctctgcaactccatcatctccttgaacactacaattagctgttctgaagcccagaaaattccatggacaccccctggaactgctctgcagttttactccaacctacacaatgctgaaacctcttcttgggtgaatttggtattgtggtgtgtggtcttggtgctccaggtcgtgcagtggaagtctgaagccaccccataccggcctctggagaggggtgaccctgagtggagctctgagacagatgctctcgttgggtcacgcctttcccattcctgaagaataagcggagtgcttcctgcagccgaagactccatgcccaagtgcctgtaatcccccccctcaaggccctgtttatgttgggagtcttagttttcctttcgttggggggtgggggggaaacataatgacaggcccccctccacctcttcctgcagctgtttttgtaccaaaatattatattactgtcttcatcttagtagtgagtttttgatgttaaagtacaactagataggaggaaggagtgaaggctaagcagacatggactgaaacttagaggtactgttaggcagctgccctagggatgactgctcctttatttgttgttaatgaatcttgacctccttgtgtgaaaaaaaaaaaaaaaaaa

SEQ ID NO: 193 - DNA, 3727 bp, HOMO SAPIENS
ttcccatccgcaccagcaagagggcccctgtgccccaaacgcgaaccgtacggctccagacagcaccgcggaactcggtggcttccagaaggccccgcgcctgcgcattccgctgcctgcgcctgcgcctgcgcctgcgccgttctcccggccgccgccttagcacctcctccggacggtgtcgccgaagtctcgcgagcccggagcgtggcacgtgggccccctccgcctccggctccgtcctcctctggccccctccgcccccggccccggccccacggcgggatgcgggacaacaccagccccatcagcgtgattctggtgagctcggggagcaggggcaataagctgctgttcaggtaccccttccagagaagccaggagcacccggcgtcccagacaagtaagccgcgtagcagatacgctgccagcaacacgggcgaccatgctgatgagcaggacggcgattccaggttttcagatgttattctggcaacaattttggcaaccaagtctgaaatgtgtggccaaaaatttgaactgaagattgataatgtgcgatttgttgggcacccaacactgctacagcatgctctggggcagatctccaaaacagatccttccccgaagagggaagcacctactatgattctttttaatgtggtgtttgcactgagggccaacgcagacccgtcagtgataaactgtctgcataacctgtcccgtcgtatcgccaccgtgctgcagcacgaggagcgccgctgccagtacctcacccgggaggccaagctgatcctggcgctccaggatgaggtgtccgccatggctgatggaaatgaaggtcctcagtccccattccatcacatcctgcccaagtgcaagctggccagggacctcaaggaagcttatgacagcctgtgcacgtcgggcgtagttcggcttcacatcaacagctggctggaggtgagcttctgcctgccccacaagatccactatgcggcctccagtctgatccccccagaggccatcgaacggagcctgaaagccatccgcccctaccatgccctgctgctgctcagtgatgagaagtccttgctgggtgagcttcctattgactgctcccctgccctagtgcgggtgatcaagaccacatctgctgtgaagaacctgcagcagctagcccaagatgcggacctggccttgctgcaggttttccagcttgcagctcatctggtgtactggggcaaggccatcatcatctacccgctgtgtgagaacaacgtctacatgctgtctcccaatgccagcgtatgtctgtactccccgctggccgagcagttctcccaccagttcccatctcatgacctgccgtccgttcttgccaagttctccttgccggtctccttgtcagaatttaggaatcccctggcccccgctgtgcaggagacccagctcatccagatggtggtgtggatgctgcagcgccggcttctcatccagctgcacacctatgtctgcctgatggcctcacccagcgaggaggagccccgtccgcgagaggacgacgtccccttcactgcccgggtcggcggtcgcagcctcagcacgcccaacgccctcagctttggctccccaaccagcagcgatgacatgaccctcaccagccccagcatggacaactccagcgcagagctacttcccagcggggactcgccactgaaccagaggatgacggagaacctgctggccagcctgtcggagcatgaacgcgcagccatcctcagtgtacccgcagcccagaaccctgaggacctccgcatgtttgccaggctccttcactacttccgcggccgccaccacctggaggagattatgtacaacgagaacacgcggcgctcccagctgctcatgctgtttgacaagttccgcagcgtgctggtggtgaccacccacgaggaccctgtcattgccgtcttccaggctctgctcccctgagcccaggcggagggcggaaggctgctggggtgcgcaggtgggcgctcgcgtctccccaccccagggctccccccgtgctgaggctgagccctcttggccctgaggcctggcattgggtggatgcgggctggccgtggcccagtgaagcctgcagagccccgctgtccttgcccctggtggttccgctgtggggctgctgccctctgtgttcctacgcttccctccagtccttgccgcacgcgtaggcatctccacgctggaggggggcctgccaggactcctgtctctgggtgaggccgcatccttcaaggcccatgtgggctgtgcgtttctcagaccctccttctgtccctacacctgctccttggaccccccagtctgtggccaccctgaagaatgtgcagaaacacttgtgtggcctgtccctgtctctctgacagccttccatttgtgaagtgccctgtggccccctccccagcacctctgtctgccatgcgcttcttcctcccaggctaccctgagcctttcctggcccagtcctcaccacagtccacagaagccacaaacaggctcatagccaagctgtgacctggtcctgaccatctggggcacgagggcctgggctggccctgctaggctggagaagccctgtcacctgtgcacatcttgctggtggaggcatggcccactgtgcaggaccccaccctcgggggctttcggctcccacactgatgattctccccagcatccacaccgggcctggcgctacgtactcaggcccccagctctcgtgtcctggaggaagagctagctccagacatgggttgatcacctagaggagctctggctaaggcacagttttctagaaataaaacatttattcggtttggaaaggccccttggattcctggctggggacaatgatgacctggaccctggccagaagagccctggccctccagcaaggcagcacctgctctgatgcacctgtgcacccctggccctcccagccacctgggagtccgaagcttagcctggaggtggccaagccagtccctactcttgggctgcggccacgtgaggctccgcatcagcagccaggggcgagcactagtggacaaagccagcaaatgcggcgttcctgtgagcagataccctcaaccagccagctgtcaaaagtatttcaagataaaatccaggccaagcaaagcctttaagttcccgtccattctgtgattcccacgctgcttccagctcaccaggtggggtgcctgctgcccaccctgacccacctcagtagggaggagcaggaccctctacatccctgtgggtgcagggcacacgcccctcgttgtctcactgagcccccacagagccgcctgcaaatgagtcaaagcctggccgccctcatcaccacagccccgtgccctggctccttcacacagaacacatccaagtcccacatcctgacaaaaacatgacccctttgatcacttcctgccaaacctccctttcctcaccgactcctccgccgaccctaagtccccctgctgtgcccactgctccatccttggcaacctgaccacgctgctcttagcactgcagtcatcctcttctccaatcagcttctcatcctcatgtgctgcctccgtcaagggcaggcgacactgtgtcctcggccttctttctgcctccactccaaccaaccctttcttttcctttcctttttttt

SEQ ID NO: 194 - DNA, 3278 bp, HOMO SAPIENS
ggcccgaagatggcggcggtggctggatctggggctgccgcggctccgagctcactgctcctcgtggtgggcagcgagttcgggagcccggggctcctcacctacgtcctggaggagctcgaaagaggcatccggtcttgggatgtcgatcctggcgtctgcaaccttgatgaacagctcaaggtctttgtgtcccgacactctgccaccttctccagcattgtgaaaggccagcggagcctgcaccaccgtggagacaacctggagaccctggtcctcctgaacccatcagacaagtccctgtatgatgagctccggaaccttctgttggaccctgcctctcacaagctactggtgttggctgggccctgcctggaggagacgggggagctgctgctacagacagggggcttctcgcctcaccacttcctccaggtcctgaaggacagagagatccgggacatcctggccaccacgcccccacctgtgcagccgcccatactcaccatcacctgccccaccttcggtgactgggctcagctggcacccgctgtgcctggccttcagggggcgctccggctccagctgcggctgaaccccccggcgcagctgcccaactctgagggcctgtgcgaattcctggagtacgtggctgagtctctggagccaccgtcccccttcgagctgctggagcccccgacctccgggggcttcctcaggctgggccggccctgctgctacatcttccctggaggcctcggggatgccgccttcttcgccgtcaatggcttcactgtgctggtcaacggtggctcaaaccccaagtccagtttctggaagctggtgcggcacctggaccgcgtggatgccgtgctggtgacccaccctggcgccgacagcctccccggcctcaacagcctgctgcggcgcaaactggcggagcgctccgaggtggctgctggtgggggctcctgggacgacaggctgcgcaggctcatctcccccaacctgggggtcgtgttcttcaacgcctgcgaggccgcgtcgcggctggcgcgcggcgaggatgaggcggagctggcgctgagcctcctggcgcagctgggcatcacgcctctgccactcagccgcggccccgtgccagccaaacccaccgtgctcttcgagaagatgggcgtgggccggctggacatgtatgtgctgcacccgccctccgccggcgccgagcgcacgctggcctctgtgtgcgccctgctggtgtggcaccccgccggccccggcgagaaggtggtgcgcgtgctgttccccggttgcaccccgcccgcctgcctcctggacggcctggtccgcctgcagcacttgaggttcctgcgagagcccgtggtgacgccccaggacctggaggggccggggcgagccgagagcaaagagagcgtgggctcccgggacagctcgaagagagagggcctcctggccacccaccctagacctggccaggagcgccctggggtggcccgcaaggagccagcacgggctgaggccccacgcaagactgagaaagaagccaagaccccccgggagttgaagaaagaccccaaaccgagtgtctcccggacccagccgcgggaggtgcgccgggcagcctcttctgtgcccaacctcaagaagacgaatgcccaggcggcacccaagccccgcaaagcgcccagcacgtcccactctggcttcccgccggtggcaaatggaccccgcagcccgcccagcctccgatgtggagaagccagcccccccagtgcagcctgcggctctccggcctcccagctggtggccacgcccagcctggagctggggccgatcccagccggggaggagaaggcactggagctgcctttggccgccagctcaatcccaaggccacgcacaccctcccctgagtcccaccggagccccgcagagggcagcgagcggctgtcgctgagcccactgcggggcggggaggccgggccagacgcctcacccacagtgaccacacccacggtgaccacgccctcactacccgcagaggtgggctccccgcactcgaccgaggtggacgagtccctgtcggtgtcctttgagcaggtgctgccgccatccgcccccaccagtgaggctgggctgagcctcccgctgcgtggcccccgggcgcggcgctcggcttccccacacgatgtggacctgtgcctggtgtcaccctgtgaatttgagcatcgcaaggcggtgccaatggcaccggcacctgcgtcccccggcagctcgaatgacagcagtgcccggtcacaggaacgggcaggtgggctgggggccgaggagacgccacccacatcggtcagcgagtccctgcccaccctgtctgactcggatcccgtgcccctggcccccggtgcggcagactcagacgaagacacagagggctttggagtccctcgccacgaccctttgcctgaccccctcaaggtccccccaccactgcctgacccatccagcatctgcatggtggaccccgagatgctgccccccaagacagcacggcaaacggagaacgtcagccgcacccggaagcccctggcccgccccaactcacgcgctgccgcccccaaagccactccagtggctgctgccaaaaccaaggggcttgctggtggggaccgtgccagccgaccactcagtgcccggagtgagcccagtgagaagggaggccgggcacccctgtccagaaagtcctcaacccccaagactgccactcgaggcccgtcggggtcagccagcagccggcccggggtgtcagccaccccacccaagtccccggtctacctggacctggcctacctgcccagcgggagcagcgcccacctggtggatgaggagttcttccagcgcgtgcgcgcgctctgctacgtcatcagtggccaggaccagcgcaaggaggaaggcatgcgggccgtcctggacgcgctactggccagcaagcagcattgggaccgtgacctgcaggtgaccctgatccccactttcgactcggtggccatgcatacgtggtacgcagagacgcacgcccggcaccaggcgctgggcatcacggtgttgggcagcaacagcatggtgtccatgcaggatgacgccttcccggcctgcaaggtggagttctagccccatcgccgacacgccccccactcagcccagcccgcctgtccctagattcagccacatcagaaataaactgtgactacacttggcaa

SEQ ID NO: 195 - DNA, 2117 bp, HOMO SAPIENS
ctcccccctgggtcggacgctgagcggagccgcgggcgggagggcggacggaccgactgacggtagggacgggaggcgagcaagatggcgcagacgcagggcacccggaggaaagtctgttactactacgacggggatgttggaaattactattatggacaaggccacccaatgaagcctcaccgaatccgcatgactcataatttgctgctcaactatggtctctaccgaaaaatggaaatctatcgccctcacaaagccaatgctgaggagatgaccaagtaccacagcgatgactacattaaattcttgcgctccatccgtccagataacatgtcggagtacagcaagcagatgcagagattcaacgttggtgaggactgtccagtattcgatggcctgtttgagttctgtcagttgtctactggtggttctgtggcaagtgctgtgaaacttaataagcagcagacggacatcgctgtgaattgggctgggggcctgcaccatgcaaagaagtccgaggcatctggcttctgttacgtcaatgatatcgtcttggccatcctggaactgctaaagtatcaccagagggtgctgtacattgacattgatattcaccatggtgacggcgtggaagaggccttctacaccacggaccgggtcatgactgtgtcctttcataagtatggagagtacttcccaggaactggggacctacgggatatcggggctggcaaaggcaagtattatgctgttaactacccgctccgagacgggattgatgacgagtcctatgaggccattttcaagccggtcatgtccaaagtaatggagatgttccagcctagtgcggtggtcttacagtgtggctcagactccctatctggggatcggttaggttgcttcaatctaactatcaaaggacacgccaagtgtgtggaatttgtcaagagctttaacctgcctatgctgatgctgggaggcggtggttacaccattcgtaacgttgcccggtgctggacatatgagacagctgtggccctggatacggagatccctaatgagcttccatacaatgactactttgaatactttggaccagatttcaagctccacatcagtccttccaatatgactaaccagaacacgaatgagtacctggagaagatcaaacagcgactgtttgagaaccttagaatgctgccgcacgcacctggggtccaaatgcaggcgattcctgaggacgccatccctgaggagagtggcgatgaggacgaagacgaccctgacaagcgcatctcgatctgctcctctgacaaacgaattgcctgtgaggaagagttctccgattctgaagaggagggagaggggggccgcaagaactcttccaacttcaaaaaagccaagagagtcaaaacagaggatgaaaaagagaaagacccagaggagaagaaagaagtcaccgaagaggagaaaaccaaggaggagaagccagaagccaaaggggtcaaggaggaggtcaagttggcctgaatggacctctccagctctggcttcctgctgagtccctcacgtttcttccccaacccctcagattttatattttctatttctctgtgtatttatataaaaatttattaaatataaatatccccagggacagaaaccaaggccccgagctcagggcagctgtgctgggtgagctcttccaggagccaccttgccacccattcttcccgttcttaactttgaaccataaagggtgccaggtctgggtgaaagggatacttttatgcaaccataagacaaactcctgaaatgccaagtgcctgcttagtagctttggaaaggtgcccttattgaacattctagaaggggtggctgggtcttcaaggatctcctgtttttttcaggctcctaaagtaacatcagccatttttagattggttctgttttcgtaccttcccactggcctcaagtgagccaagaaacactgcctgccctctgtctgtcttctcctaattctgcaggtggaggttgctagtctagtttcctttttgagatactattttcatttttgtgagcctctttgtaataaaatggtacatttctatatc

SEQ ID NO: 196 - DNA, 4236 bp, HOMO SAPIENS
ggtgggcggggggaggaggcggccctagcgccattttgtgggagcgaagcggtggctgggctgcgcttgggtccgtcgctgcttcggtgtccctgtcgggcttcccagcagcggcctagcgggaaaagtaaaagatgtctgaatatattcgggtaaccgaagatgagaacgatgagcccattgaaataccatcggaagacgatgggacggtgctgctctccacggttacagcccagtttccaggggcgtgtgggcttcgctacaggaatccagtgtctcagtgtatgagaggtgtccggctggtagaaggaattctgcatgccccagatgctggctggggaaatctggtgtatgttgtcaactatccaaaagataacaaaagaaaaatggatgagacagatgcttcatcagcagtgaaagtgaaaagagcagtccagaaaacatccgatttaatagtgttgggtctcccatggaaaacaaccgaacaggacctgaaagagtattttagtacctttggagaagttcttatggtgcaggtcaagaaagatcttaagactggtcattcaaaggggtttggctttgttcgttttacggaatatgaaacacaagtgaaagtaatgtcacagcgacatatgatagatggacgatggtgtgactgcaaacttcctaattctaagcaaagccaagatgagcctttgagaagcagaaaagtgtttgtggggcgctgtacagaggacatgactgaggatgagctgcgggagttcttctctcagtacggggatgtgatggatgtcttcatccccaagccattcagggcctttgcctttgttacatttgcagatgatcagattgcgcagtctctttgtggagaggacttgatcattaaaggaatcagcgttcatatatccaatgccgaacctaagcacaatagcaatagacagttagaaagaagtggaagatttggtggtaatccaggtggctttgggaatcagggtggatttggtaatagcagagggggtggagctggtttgggaaacaatcaaggtagtaatatgggtggtgggatgaactttggtgcgttcagcattaatccagccatgatggctgccgcccaggcagcactacagagcagttggggtatgatgggcatgttagccagccagcagaaccagtcaggcccatcgggtaataaccaaaaccaaggcaacatgcagagggagccaaaccaggccttcggttctggaaataactcttatagtggctctaattctggtgcagcaattggttggggatcagcatccaatgcagggtcgggcagtggttttaatggaggctttggctcaagcatggattctaagtcttctggctggggaatgtagacagtggggttgtggttggttggtatagaatggtgggaattcaaatttttctaaactcatggtaagtatattgtaaaatacatatgtactaagaattttcaaaattggtttgttcagtgtggagtatattcagcagtatttttgacatttttctttagaaaaaggaagagctaaaggaattttataagttttgttacatgaaaggttgaaatattgagtggttgaaagtgaactgctgtttgcctgattggtaaaccaacacactacaattgatatcaaaaggtttctcctgtaatattttatccctggacttgtcaagtgaattctttgcatgttcaaaacggaaaccattgattagaactacattctttaccccttgttttaatttgaaccccaccatatggatttttttccttaagaaaatctccttttaggagatcatggtgtcacagtgtttggttcttttgttttgttttttaacacttgtctcccctcatacacaaaagtacaatatgaagccttcatttaatctctgcagttcatctcatttcaaatgtttatggaagaagcacttcattgaaagtagtgctgtaaatattctgccataggaatactgtctacatgctttctcattcaagaattcgtcatcacgcatcacaggccgcgtctttgacggtgggtgtcccatttttatccgctactctttatttcatggagtcgtatcaacgctatgaacgcaaggctgtgatatggaaccagaaggctgtctgaacttttgaaaccttgtgtgggattgatggtggtgccgaggcatgaaaggctagtatgagcgagaaaaggagagagcgcgtgcagagacttggtggtgcataatggatattttttaacttggcgagatgtgtctctcaatcctgtggctttggtgagagagtgtgcagagagcaatgatagcaaataatgtacgaatgttttttgcattcaaaggacatccacatctgttggaagacttttaagtgagtttttgttcttagataacccacattagatgaatgtgttaagtgaaatgatacttgtactccccctacccctttgtcaactgctgtgaatgctgtatggtgtgtgttctcttctgttactgatatgtaagtgtggcaatgtgaactgaagctgatgggctgagaacatggactgagcttgtggtgtgctttgcaggaggacttgaagcagagttcaccagtgagctcaggtgtctcaaagaagggtggaagttctaatgtctgttagctacccataagaatgctgtttgctgcagttctgtgtcctgtgcttggatgctttttataagagttgtcattgttggaaattcttaaataaaactgatttaaataatatgtgtctttgttttgcagccctgaatgcaaagaattcatagcagttaattccccttttttgacccttttgagatggaactttcataaagtttcttggcagtagtttattttgcttcaaataaacttatttgaaaagttgtctcaagtcaaatggattcatcacctgtcatgcattgacacctgatacccagacttaattggtatttgttcttgcattggccaaagtgaaaatttttttttttcttttgaaatctagttttgaataagtctgggtgaccgcacctaaaatggtaagcagtaccctccggctttttcttagtgcctctgtgcatttgggtgatgttctatttacatggcctgtgtaaatctccattgggaagtcatgccttctaaaaagattcttatttgggggagtgggcaaaatgttgattattttctaatgctttgtagcaaagcatatcaattgaaaagggaatatcagcaccttcctagtttgggatttgaaaagtggaattaattgcagtagggataaagtagaagaaaccacaaattatcttgtgcctgaaatccattaagaggcctgatagctttaagaattagggtgggttgtctgtctggaagtgttaagtggaatgggctttgtcctccaggaggtgggggaatgtggtaacattgaatacagttgaataaaatcgcttacaaaactcacactctcacaatgcattgttaagtatgtaaaagcaataacattgattctctgttgtacttttttgtaactaattctgtgagagttgagctcattttctagttggaagaatgtgatatttgttgtgttggtagtttacctaatgcccttacctaattagattatgataaataggtttgtcattttgcaagttacataaacatttatcaatgaagtcatcctttagacttgtaatcgccacattgtttcattattcagtttcctctgtaaagggatcttgagttgttttaattttttttttctgcatctgaatctgcatgatttccaaaccctgtaccatctgaattttgcattttagcacttgcactattactcagcagcagtaacatggtaacacttaaaatggtactcggggacctccaaagactaaactgacaagccttcaaggagcccaggggtaagttaacttgtcaacggcatggtttaatcccttctttacacttgtgtaaatttcagttactggtcatagaaggctttcaatgttgagtggccttttattaacatgtttatggtactgcatagatacgggtatttattttaccctaagaagattttgaagtttaaaagtacttaaactatttggcaaagatttgtttttaaaaatctatttggtcaatctaaatgcattcattctaaaaaattttttgaaccagataaataaaatttttttttgacaccacaaaaaaaaaaaaaaaaaaaa

SEQ ID NO: 197 - DNA, 1131 bp, HOMO SAPIENS
tggagagagcggctctcgtggctggggagttggatgcaccaaacctgtgtgcggctggagagggaggcttctgccagaccctctcccgggcctgtcctgccacccaggcccctccccagtctcacactgagctccagatcagggaagggccgaaaaggacgatcagggcagccgcagaaggggcgccctgcgtgggacgggtccgttgcgcgcctggtaaccgagggggaagggaaggggcctctggcgtgcggggcggtgtcgcgcaggtcccaccccgcctgcccgcgccgcccattggtcccgagcgcgatgacttggcgggcggagcaggaaggaaaccgctcccgagcacggcggcggcgtcgtctcccggcagtgcagctgccgctaccgccgccctctgcccgccggcccgtctgtctacccccagcatgagcggcctgcgcgtctacagcacgtcggtcaccggctcccgcgaaatcaagtcccagcagagcgaggtgacccgaatcctggatgggaagcgcatccaataccagctagtggacatctcccaggacaacgccctgagggatgagatgcgagccttggcaggcaaccccaaggccaccccaccccagattgtcaacggggaccagtactgtggggactatgagctcttcgtggaggctgtggaacaaaacacgctgcaggagttcctgaagctggcttgagtcaagcctgtccagagttcccctgctggactccatcaccacactccccccagccttcacctggccatgaaggaccttttgaccaactccctgtcattcctaacctaaccttagagtccctcccccaatgcaggccacttctcctccctcctctctaaatgtagtcccctctcctccatctaaaggcaacattccttacccattagtctcagaaattgtcttaagcaacagccccaaatgctggctgcccccagccaagcattggggccgccatcctgcctggcactggctgatgggcacctctgttggttccatcagccagagctctgccaaaggccccgcagtccctctcccaggaggaccctagaggcaattaaatgatgtcctgttccattggcaaaaaaaaaaaaaaaaa

SEQ ID NO: 198 - DNA, 1220 bp, HOMO SAPIENS
gttacattggagaactggagtggtctggagttccacggtgtagtggaccagaggccacctctcctgggcttctcagtgtctcgccggcggggttcggcctgagctggattgacatagcccttggcggatttaaacaacctaaacattaagcagtacagctgcctcaaacctttgggattttcagaatgactgacactgccgaagctgttccaaagtttgaagagatgtttgctagtagattcacagaaaatgacaaggagtatcaggaatacctgaaacgccctcctgagtctcctccaattgttgaggaatggaatagcagagctggtgggaaccaaagaaacagaggcaatcggttgcaagacaacagacagttcagaggcagggacaacagatgggggtggccaagtgacaatcgatccaatcagtggcatggacgatcctggggtaacaactacccgcaacacagacaagaaccttactatccccagcaatatggacattatggttacaaccagcggcctccttacggttactactgatagaaatgttggcagcttttagtaaaagcatttactctgttaccatgagaaaagtttgggtgtcttctgttggtcatagttttacatctgattttacagaatggattattgattttttggaagttgagactttaaaaaaaatagatcttacttgcgaaatgcgatggttgctgggaatacctgaaactgtggattatattgcttgacttctacctcagaatcttctttgtttcatgacttaatagtgctttaagtttggtatattatttgacctctaggaattctttgttttacacagaaataaaaattttaaaatagaaaatgcttttactttgtaaggtaagagagtatccatatgcttagatgtgctcgtttctaaaattctagaggttgatataatcagctcatgaatgcacagctatgctttttgtgatagattgtacataacatcagcagttgaaaggtaaaacaattgcttttttttttttttgcatttgttaagtgactatggtactttgtgattccttaatctatagatgagtcagctccacacttgagtctctttttagagggaaatcagtaataaagctgtaaaataaggaagaaaaaaaaaaaaaaaaaaaaaaaaaaaaaaaaaaaaaaaaaaaaaaaaaaaaaaaaaaaaaaaaaaaaaaaaaa

SEQ ID NO: 199 - DNA, 3344 bp, HOMO SAPIENS
ggtacagctgcgcgtctgcgggaataggtgcagcgggcccttggcgggggactctgagggaggagctggggacggcgaccctaggagagttctttggggtgactttcaagatggactctactctaacagcaagtgaaatccggcagcgatttatagatttcttcaagaggaacgagcatacgtatgttcactcgtctgccaccatcccattggatgaccccactttgctctttgccaatgcaggcatgaaccagtttaaacccattttcctgaacacaattgacccatctcaccccatggcaaagctgagcagagctgccaatacccagaagtgcatccgggctgggggcaaacataatgacctggacgatgtgggcaaggatgtctatcatcacaccttcttcgagatgctgggctcttggtcttttggagattactttaaggaattggcatgtaagatggctctggaactcctcacccaagagtttggcattcccattgaaagactttatgttacttactttggcggggatgaagcagctggcttagaagcagatctggaatgcaaacagatctggcaaaatttggggctggatgacaccaaaatcctcccaggcaacatgaaggataacttctgggagatgggtgacacgggcccctgtggtccttgcagtgagatccactacgaccggattggtggtcgggacgccgcacatcttgtcaaccaggacgaccctaatgtgctggagatctggaaccttgtgttcatccagtataacagggaagctgatggcattctgaaacctcttcccaagaaaagcattgacacagggatgggcctggaacgactggtatctgtgctgcagaataagatgtccaactatgacactgacctttttgtcccttactttgaagccattcagaagggcacaggtgcccgaccatacactgggaaagttggtgctgaggatgccgatgggattgacatggcctaccgggtgctggctgaccacgctcggaccatcactgtggcactggctgatggtggccggcctgacaacacagggcgtggatatgtgttgagacggattctccgccgagctgtccgatacgcccatgaaaagctcaatgccagcaggggcttctttgctacgttagtggatgttgtcgtccagtccctgggagatgcatttcctgagctgaagaaggacccagacatggtgaaggacatcattaatgaagaagaggtgcagtttctcaagactctcagcagagggcgtcgcatcctggacaggaaaattcagagcctgggagacagcaagaccattcccggagacactgcttggctcctctatgacacctatgggtttccagtggatctgactggactgattgctgaagagaagggcctggtggtagacatggatggctttgaagaggagaggaaactggcccagctgaaatcacagggcaagggagctggtggggaagacctcattatgctggacatttacgctatcgaagagctccgggcacggggtctggaggtcacagatgattccccaaagtacaattaccatttggactccagtggtagctatgtatttgagaacacagtggctacggtgatggctctgcgcagggagaagatgttcgtggaagaggtgtccacaggccaggagtgtggagtggtgctggacaagacctgtttctatgctgagcaaggaggccagatctatgacgaaggctacctggtgaaggtggatgacagcagtgaagataaaacagagtttacagtgaagaatgctcaggtccgaggagggtatgtgctacacattggaaccatctacggtgacctgaaagtgggggatcaggtctggctgtttattgatgagccccgacgaagacccatcatgagcaaccacacagctacgcacattctgaacttcgccctgcgctcagtgcttggggaagctgaccagaaaggctcattggttgctcctgaccgcctcagatttgactttactgccaagggagccatgtccacccaacagatcaagaaggctgaagagattgctaatgagatgattgaggcagccaaggccgtctatacccaggattgccccctggcagcagcgaaagccatccagggcctacgggctgtgtttgatgagacctatcctgaccctgtgcgagtcgtctccattggggtcccggtgtccgagttgctggatgacccctctgggcctgctggctccctgacttctgttgagttctgtgggggaacgcacctgcggaactcgagtcatgcaggagcttttgtgatcgtgacggaagaagccattgccaagggtatccggaggattgtggctgtcacaggtgccgaggcccagaaggccctcaggaaagcagagagcttgaagaaatgtctctctgtcatggaagccaaagtgaaggctcagactgctccaaacaaggatgtgcagagggagatcgctgaccttggagaggccctggccactgcagtcatcccccagtggcagaaggatgaattgcgggagactctcaaatccctaaagaaggtcatggatgacttggaccgagccagcaaagccgatgtccagaaacgagtgttagagaagacgaagcagttcatcgacagcaaccccaaccagcctcttgtcatcctggagatggagagcggcgcctcagccaaggccctgaatgaagccttgaagctcttcaagatgcactcccctcagacttctgccatgctcttcacggtggacaatgaggctggcaagatcacgtgcctgtgtcaagttccccagaatgcagccaatcggggcttaaaagccagcgagtgggtgcagcaggtgtcaggcttgatggacggtaaaggtggtggcaaggatgtgtctgcacaggccacaggcaagaacgttggctgcctgcaggaggcgctgcagctggccacttccttcgcccagctgcgcctcggggatgtaaagaactgagtggggaaggaggaggctcccactggatccatccgtccagccaagagctcttcatctgctacaagaacatttgaatcttgggacctttaaagagcccctcctaacccagcagtaactggaacacacttgggagcagtcctatgtctcagtgccccttaaatttctgccctgagccctccacgtcagtgccatcggtctagaaccactaaccccgcattgctgttgatcgtcacgctcgcatctatagataacggctctccagacctgagctttccgcgtcagcaagtaggaatcgtttttgctgcagagaataaaaggaccacgtgc

SEQ ID NO: 200 - DNA, 2809 bp, HOMO SAPIENS
tgtgtgtgtgtatgtgtgctggtgaatgtgagtacagggaagcagcggccgccatttcagggagcttgtcgacgctgtcgcaggggtggatcctgagctgccgaagccgccgtcctgctctcccgcgtgggcttctctaattccattgttttttttagattctctcgggcctagccgtccttggaacccgatattcgggctgggcggttccgcggcctgggcctaggggcttaacagtagcaacagaagcggcggcggcggcagcagcagcagcagcagcagcaatctcttcccgaacacgagcaccacaggcgcccgaaggccggaacaggcgtttagagaaaatggcagacgatattgatattgaagcaatgcttgaggctccttacaagaaggatgagaacaagttgagcagtgccaacggccatgaagaacgtagcaaaaagaggaaaaaaagcaagagcagaagtcgtagtcatgaacgaaagagaagcaaaagtaaggaacggaagcgaagtagagacagagaaaggaaaaagagcaaaagccgtgaaagaaagcgaagtagaagcaaagagaggcgacggagccgctcaagaagtcgagatcgaagatttagaggccgctacagaagtccttactccggaccaaaatttaacagtgccatccgaggaaagattgggttgcctcatagcatcaaattaagcagacgacgttcccgaagcaaaagtccattcagaaaagacaagagccctgtgagagaacctattgataatttaactcctgaggaaagagatgcaaggacagtcttctgtatgcagctggcggcaagaattcgaccaagggatttggaagagtttttctctacagtaggaaaggttcgagatgtgaggatgatttctgacagaaattcaagacgttccaaaggaattgcttatgtggagttcgtcgatgttagctcagtgcctctagcaataggattaactggccaacgagttttaggcgtgccaatcatagtacaggcatcacaggcagaaaaaaacagagctgcagcaatggcaaacaatttacaaaagggaagtgctggacctatgaggctttatgtgggctcattacacttcaacataactgaagatatgcttcgtgggatctttgagccttttggaagaattgaaagtatccagctgatgatggacagtgaaactggtcgatccaagggatatggatttattacattttctgactcagaatgtgccaaaaaggctttggaacaacttaatggatttgaactagcaggaagaccaatgaaagttggtcatgttactgaacgtactgatgcttcgagtgctagttcatttttggacagtgatgaactggaaaggactggaattgatttgggaacaactggtcgtcttcagttaatggcaagacttgcagagggtacaggtttgcagattccgccagcagcacagcaagctctacagatgagtggctctttggcatttggtgctgtggcagaattctcttttgttatagatttgcaaacaagactttcccagcagactgaagcttcagctttagctgcagctgcctctgttcagccacttgcaacacaatgtttccaactctctaacatgtttaaccctcaaacagaagaagaagttggatgggataccgagattaaggatgatgtgattgaagaatgtaataaacatggaggagttattcatatttatgttgacaaaaattcagctcagggcaatgtgtatgtgaagtgcccatcaattgctgcagctattgctgctgtcaatgcattgcatggcaggtggtttgctggtaaaatgataacagcagcatatgtacctcttccaacttaccacaacctgtttcctgattctatgacagcaacacagctactggttccaagtagacgatgaaggaagatatagtcccttatgtatatagctttttttctttcttgagaattcatcttgagttatcttttatttagataaaaataaagaggcaaggatctactgtcatttgtatgcaatttcctgttaccttgaaaaaataaaaatgttaacaggaatgcagtgtgctcattctccctaaatagtaaatcccactgtatacaaaactgttctcttgttctgccttttaaaatgttcatgtagaaaattaatgaactataggaatagctctaggagaacaaatgtgctttctgtaaaaaggcagaccagggatgtaatgtttttaatgtttcagaagcctaactttttacacagtggttacatttcacatttcactaatgttgatatttggctgatggttgagcagtttctgaaatacacatttagtgtatggaaatacaagacagctaaagggctgtttggttagcatctcatcttgcattctgatcaattggcaagaaagggagatttcaaaattatatttcttgatggtatcttttcaattaatgtatctgtaaaagtttctttgtaaatactatgtgttctggtgtgtcttaaaattccaaacaaaatgatccctgcatttcctgaagatgtttaaacgtgagagtctggtaggcaaagcagtctgagaaagaaataggaaatgcagaaataggttttgtctggttgcatataatctttgctctttttaagctctgtgagctctgaaatatatttttgggttacttcagtgtgtttgacaagacagcttgatatttctatcaaacaaatgactttcatattgcaacaatctttgtaagaaccactcaaataaaagtctcttaaaaaggcca

SEQ ID NO: 201 - DNA, 3522 bp, HOMO SAPIENS
gccccatcacgtgaccgcagccccagcgcggcggggccggcgtctcctggctgccgtcacttccggttctctgtcagtcgcgagcgaacgaccaagagggtgttcgactgctagagccgagcgaagcgatgcctaaatcaaaggaacttgtttcttcaagctcttctggcagtgattctgacagtgaggttgacaaaaagttaaagaggaaaaagcaagttgctccagaaaaacctgtaaagaaacaaaagacaggtgagacttcgagagccctgtcatcttctaaacagagcagcagcagcagagatgataacatgtttcagattgggaaaatgaggtacgttagtgttcgcgattttaaaggcaaagtgctaattgatattagagaatattggatggatcctgaaggtgaaatgaaaccaggaagaaaaggtatttctttaaatccagaacaatggagccagctgaaggaacagatttctgacattgatgatgcagtaagaaaactgtaaaattcgagccatataaataaaacctgtactgttctagttgttttaatctgtctttttacattggcttttgttttctaaatgttctccaagctattgtatgtttggattgcagaagaatttgtaagatgaatacttttttttaatgtgcattattaaaaatattgagtgaagctaattgtcaactttattaaggattactttgtctgcccaccacctagtgtaaaataaaatcaagtaatacaatcttaactgttgtggccttttttgatcataagagttggtactgtttaaggccaaaagtaacagtttttatagatcttttagtttcaactcagcttttacaataaaaaggatttgtattgcattgagtttataaacttttggtttgtgaacttcatatttgatcttttctcttccaatcaaatgtctaggcttgtttgacttccacccccaatggtttttcactctttttatttacttcattttcctttaataacttaatctcttcatgttcagtttttacttcactctttattcttttctttgattatggtatgcttatttggaaagtcagtgaaactgtcaaaatgttatctcaataagatacttatatgagaactacaatcaccgaatctactgtattcaatattagcagatctaatttgataaacaacatggcttgtgtgaaaactgagcaggtgtttgtttacccatagtgttctgtgtagttattgcttagtctgcagaaaataatgacttagatgagatgtctgacttgctttcacttattaaacatgttcaccatgggatgatgtctgtaacatcagatattgttcaactagactaggatttaataaaaattgtgaaagcttactggcctaacattttattttataatattgggtatgaattatatgtagccagagatgtcattaagctttactgttatagtaggtaatatggttagtttgtagggaaaagagcatatgagcacatgcttgtgtattttggcctttgccccagtagaacagaccaatggcattctagacttgatgatactaagttttagcagacactagtaagtggtttgtatttaaccatactgatgaagcagacagattgaggcacagattttagtggctttgtggcaataaatagggcatggtgtgccttaggaaaagaatgtttataaagggaattataactgaaattaaaggaggcggcagtgaagaggaaataattctcttctatctaaatgatatacatatgatattttgagatttttataacagcagtggaacacaattctaggtagagtagaaaaaggaaagttttaaagacatataaaagattcttgttgacaaattatttttggtagcaaatctcaaatggttacctgctattaaggtctgccatattagagttttgcactattttgctaccaagtttgattcatacatctaaaacattttgtagttacttgtcaaggacttaatttgaaaatcatttgccaggccacatagttatcaatttttttttctatcagctattctgttgtatttctaaaacattttttagatgactttttaaagtatatttagcagtaaccttatgaggttcaaattggtaaatctcttgtaatttagccttcatcgaataataggtaccagtgtattaaaaatgtgtattttttgcagccccttgaaccagagtaggttcagagaaactcccaaagtttgtactttagacacatcatgcttgattggtaacttccctccttttttggggaacatgtttgtgtcctattaacttaattggatagatttttaaatatttcttatttttggcacacggaaagggtagttcgagtacagaactttgatttttggtgtagatgcagagggaatgatgggtaaatttcctaggtttatgtgaatttagggggtgtatgcattttgaaacaatctactaacagatggtgctgaaatctattacctacatgttttctagttgttcagcattatgttaatgaagcctccatataaggagtgtttctctggcacagttggtaagttgactgctaacttcatttaaatgtgttactggatatgcagtatactgaaattattaatcagtttgtgtataggaaaagagaactgggttaaaagcaaattaacttgttctgaaaagaaagtatagattaattttgttttctgtttaaattttatctccttggtaaagatttttttttcctgggcagaaaacttggcatttttaggcgtagataccttaccttacaatgccaaaatgaatttaattccagtactcaggtttttccctttaacagactctatgtgtatcagggctttctaatgggtttttcctcttcgtttttaaaatgtgagtagcatttgaccaatttccagtgctcttagcattttacttaaagaacaaccactacaaaagaaaatctttgtaatttgattgtcttttgctttgcttcattaatgcctaagaacttaagaatactcctacctcattagctactcaagatgctgtgacgatcaaatctattctacataatgcgtttagaaacaaagacttgggtgaaaaatgaaataagtatattctgacttggctattgaggggaaaattcagtattaagtgttcctcacaggagatatgttagcagaatactataaaagtttgaaatttttaaaaagtaaaagtacttaaatttaggtatctctcctgaaattctttgcagttcattttttatggcagttaatccagtgaaacactcaaaagtttttttttttttaaaagtgtttttccagataaactgtagggtgaacattcacataatcacaaatatgtaattctgtaattgtggaatgcttgtatgctttgttttcgtacatcttccatggagatgtctgaatataatactccatctgtgaatattttaaatgttgaaataaaagtaagaaatgtgaaaaaaaaaaaaaaa

SEQ ID NO: 202 - DNA, 2158 bp, HOMO SAPIENS
gcggcggcgggagctggttccggctgcgcgcgcagcggtggtggtggcggcgcgatcggccgggctgtaaccgtcgtctgtccgggagcggctggagcggcagcggcggccgggcacggcgcgaggtgacgccacagggcagcggcggcagcggaggcagcggcggcagcaggagacgcagcggcggccgcagcagcagcagcaagacggactcgtggagacgcgccgccgccgccgccgccgggccgggccgggtgtcgcgcgccgaggctgggggggagtcgtcgccgccgccgccaccgctaccgccgccgccgccgccgccgaggtgactgaggagagaggcgcctcctcgctcccgccaccgccggacttcaatgcccagtccccagctcgccagcgtttttcgttggaatatacgttgcacatttatggcgattctgagtgtgagggcagacttctgccaggctcagcacagcattttcgctgacaagtgagcttggaggttctatgtgccataattaacattgccttgaagactcctggacaccgagactggcctcagaaatagttggctttttttttttttaattgcaagcatatttcttttaatgactccagtaaaattaagcatcaagtaaacaagtggaaagtgacctacacttttaacttgtctcactagtgcctaaatgtagtaaaggctgcttaagttttgtatgtagttggattttttggagtccgaaggtatccatctgcagaaattgaggcccaaattgaatttggattcaagtggattctaaatactttgcttatcttgaagagagaagcttcataaggaataaacaagttgaatagagaaaacactgattgataataggcattttagtggtctttttaatgttttctgctgtgaaacatttcaagatttattgatttttttttttcactttccccatcacactcacacgcacgctcacactttttatttgccataatgaaccgtccagcccctgtggagatctcctatgagaacatgcgttttctgataactcacaaccctaccaatgctactctcaacaagttcacagaggaacttaagaagtatggagtgacgactttggttcgagtttgtgatgctacatatgataaagctccagttgaaaaagaaggaatccacgttctagattggccatttgatgatggagctccaccccctaatcagatagtagatgattggttaaacctgttaaaaaccaaatttcgtgaagagccaggttgctgtgttgcagtgcattgtgttgcaggattgggaagggcacctgtgctggttgcacttgctttgattgaatgtggaatgaagtacgaagatgcagttcagtttataagacaaaaaagaaggggagcgttcaattccaaacagctgctttatttggagaaataccgacctaagatgcgattacgcttcagagataccaatgggcattgctgtgttcagtagaaggaaatgtaaacgaaggctgacttgattgtgccatttagagggaactcttggtacctggaaatgtgaatctggaatattacctgtgtcatcaaagtagtgatggattcagtactcctcaaccactctcctaatgattggaacaaaagcaaacaaaaaagaaatctctctataaaatgaataaaatgtttaagaaaagagaaagagaaaaggaattaattcagtgaaggatgattttgctcctagttttggagtttgaatttctgccaggattgaattattttgaaatctcctgtctttttaaactttttcaaaataggtctctaaggaaaaccagcagaacattagcctgtgcaaaaccatctgtttggggagcacactcttccattatgcttggcacatagatctccctgtggtgggattttttttttccctttttttgtgggggagggttggtggtatatttttcccctcttttttccttcctctcctacatctcccttttcccccgatccaagttgtagatggaatagaagcccttgttgctgtagatgtgcgtgcagtctggcagccttaagcccacctgggcacttttagataaaaaaaaaaaaaaaacaaaaaacaacaccaaaaaaacagcagtgatatatatatatatat

SEQ ID NO: 203 - DNA, 1507 bp, HOMO SAPIENS
tgggcggcggctgaggcgcgtgctctcgcgtggtcgctgggtctgcgtcttcccgagccagtgtgctgagctctccgcgtcgcctctgtcgcccgcgcctggcctaccgcggcactcccggctgcacgctctgcttggcctcgccatgccggtggacctcagcaagtggtccgggcccttgagcctgcaagaagtggacgagcagccgcagcacccgctgcatgtcacctacgccggggcggcggtggacgagctgggcaaagtgctgacgcccacccaggttaagaatagacccaccagcatttcgtgggatggtcttgattcagggaagctctacaccttggtcctgacagacccggatgctcccagcaggaaggatcccaaatacagagaatggcatcatttcctggtggtcaacatgaagggcaatgacatcagcagtggcacagtcctctccgattatgtgggctcggggcctcccaagggcacaggcctccaccgctatgtctggctggtttacgagcaggacaggccgctaaagtgtgacgagcccatcctcagcaaccgatctggagaccaccgtggcaaattcaaggtggcgtccttccgtaaaaagtatgagctcagggccccggtggctggcacgtgttaccaggccgagtgggatgactatgtgcccaaactgtacgagcagctgtctgggaagtagggggttagcttggggacctgaactgtcctggaggccccaagccatgttccccagttcagtgttgcatgtataatagatttctcctcttcctgccccccttggcatgggtgagacctgaccagtcagatggtagttgagggtgacttttcctgctgcctggcctttataattttactcactcactctgatttatgttttgatcaaatttgaacttcattttggggggtattttggtactgtgatggggtcatcaaattattaatctgaaaatagcaacccagaatgtaaaaaagaaaaaactggggggaaaaagaccaggtctacagtgatagagcaaagcatcaaagaatctttaagggaggtttaaaaaaaaaaaaaaaaaaaaagattggttgcctctgcctttgtgatcctgagtccagaatggtacacaatgtgattttatggtgatgtcactcacctagacaaccagaggctggcattgaggctaacctccaacacagtgcatctcagatgcctcagtaggcatcagtatgtcactctggtccctttaaagagcaatcctggaagaagcaggagggagggtggctttgctgttgttgggacatggcaatctagaccggtagcagcgctcgctgacagcttgggaggaaacctgagatctgtgttttttaaattgatcgttcttcatgggggtaagaaaagctggtctggagttgctgaatgttgcattaattgtgctgtttgcttgtagttgaataaaaatagaaacctgaatgaagaaaaaaaaaaaaaaaa

SEQ ID NO: 204 - DNA, 10005 bp, HOMO SAPIENS
gggaggccggaagttgcggcttcattactcgccatttcaaaatgctgccgaggccctaggatctgtgactgccacccctccccccacccgggctcggcgggggagcgactcatggagctgccgtaagttttaccaacagactgcagtttcttcactaccaaaatgacatcattttccacctctgctcagtgttcaacatctgacagtgcttgcaggatctctcctggacaaatcaatcaggtacgaccaaaactgccgcttttgaagattttgcatgcagcaggtgcgcaaggtgaaatgttcactgttaaagaggtcatgcactatttaggtcagtacataatggtgaagcaactttatgatcagcaggagcagcatatggtatattgtggtggagatcttttgggagaactactgggacgtcagagcttctccgtgaaagacccaagccctctctatgatatgctaagaaagaatcttgtcactttagccactgctactacagcaaagtgcagaggaaagttccacttccagaaaaagaactacagaagacgatatccccacactgcctacctcagagcataaatgcatacattctagagaagatgaagacttaattgaaaatttagcccaagatgaaacatctaggctggaccttggatttgaggagtgggatgtagctggcctgccttggtggtttttaggaaacttgagaagcaactatacacctagaagtaatggctcaactgatttacagacaaatcaggatgtgggtactgccattgtttcagatactacagatgacttgtggtttttgaatgagtcagtatcagagcagttaggtgttggaataaaagttgaagctgctgatactgaacaaacaagtgaagaagtagggaaagtaagtgacaaaaaggtgattgaagtgggaaaaaatgatgacctggaggactctaagtccttaagtgatgataccgatgtagaggttacctctgaggatgagtggcagtgtactgaatgcaagaaatttaactctccaagcaagaggtactgttttcgttgttgggccttgaggaaggattggtattcagattgttcaaagttaacccattctctctccacgtctgatatcactgccatacctgaaaaggaaaatgaaggaaatgatgtccctgattgtcgaagaaccatttcggctcctgtcgttagacctaaagatgcgtatataaagaaagaaaactccaaactttttgatccctgcaactcagtggaattcttggatttggctcacagttctgaaagccaagagaccatctcaagcatgggagaacagttagataacctttctgaacagagaacagatacagaaaacatggaggattgccagaatctcttgaagccatgtagcttatgtgagaaaagaccacgagacgggaacattattcatggaaggacgggccatcttgtcacttgttttcactgtgccagaagactaaagaaggctggggcttcatgccctatttgcaagaaagagattcagctggttattaaggtttttatagcataatggtagtacgaacataaaaatgcatttattccgttcacttaccacattatttgaaaatcaatcctttatttaattttatttccaacctgtcagagaatgttcttaggcatcaaaatccaaggtagctgtaagaaaaatactggagctaacaatgaagaacagaagtaatctgattagtcaaattattaagtgccatggattactttatgcagcagtcaggtacatagttaggtgaacccaaaagaaaaactcttgaaaacaagagatttcttccatgcacatttacaatattgaggtataattaacatgataaagtgtttccttctaacgagttgtagaaatctgagtaaccacccaaaaaagcaatagaatgtttctgtcaccccaaaacactcccttctgcccctcttcagacagtccttcagctatttcatggctctcaccctagttttttttttttttgcacttttttttttccgggggtataggggaggtgtggggcgacagggtctgtcttgttctgtctcccaggctgaagtgcagtgcagtggtatgatcatggctcactgcagccttggtttcctgggcataagtggtcttcccacttcagcctcctgagtagctgagactatagactagcataaccacactggctaattttttgtggagatgaagtctcactatgttgcccaggctggtctcgaactcctgggctcaaacaatcctcccgcctcagccttccaaattgctgggattatagtcatgaggcacctagtctggcccttttgcaagactttaatctgaaatctaaatttttaaaatttaagtacttacaaaggatatactatccaacatattgcatattatatatgtgctttaaagtttttttttttttttgagagacggtctcactttgtcatccaagctggagtgcagtggtgcaaacacggcccacctcctgggctcaagtgatcctccagcctcagcttccctcacaggcattcactatcactcccagctaattaaaataatttgtagacggtgtctcgttatgttgcccaggctggtctcgaactcctgggtttaagtgattcccccgcctcagcctcccaaagtgttgggcttacagccttgagccactatgcttggctcaaagatatttttatgaaagccctgggactatagatttagctgattaaatttatagaaaaagtcctgtcatataaactggcaaagtctgttcttaatttaattagccaaatcagacttaacttccgtcagaacatgtcttggttttaattcagataaacacacaaacatacttctctggcacagccttcagaagcatcagtttttgttttgttttgttttgttttttgagacagggtcttgctctgtcgcccaggctggagtgcactggcacaatcacagttcactgcagcctcgacctcccagatccaagcaatcctcccacctaagcctcccaagtagctgggtctataggcgcgtgccaccaccatgcccagctgaattttgtattttttgtacagacagcattttgccatgttgcccaggctggtcccaaacttctagcctcaagcaaccctcctgcctcagcctctcaaagtgctaggattgcagtcctgagctactgccccctaccctctttgcgtcttaggagtcatttagattttttttgatccttttgtttagtgcctctggagctgcttacaccaaggcaatacgccttgatatactggatggttgagaggcagcctctttttttttttttttttttttttttttttggaggatagggagtatggctgttgtgaaaagggaggtaaagagaaatggtagatctgaagaggcctcatcagagcacatattttaggacaacacatatggaaattggacatctttaagttggtttccatagagctatgcatgtatccttacccccatgggaaaatgttggtgtgttctcaagggtatgcatgtgtcattttgaagaccaaggccctagaattgtcaaacttaaggatcataaaaatcatgagggttgcttgttaaaaatgtccaaacgtgcagagactgatctttgagatctggaccaggaatttgcatttgaacaagtgttcctggaatctctatgcaagttttatacagaacatacttttggaatccttgccctagacaggggtgtccaatcttttggcttccctggtccacaatggaagaagaattgtcttggaccacacataaaatacactaacactaacaatagctgatgagctaaaaaaaaaaaaaaaaaaaatcgtggaccgggcgtagtggctcacgcctgtaatcccaacactttgggagatcacctaggtcgggagtttgagaccagcctgaccgacatggagaaaccccatttttactaaaaatacaaaaaattagctgggcatggtggtgcatgcctgtagtcccagctactcaggaggctgaggcaggagaatcgcttgaacctgagagggggagattgcggtgagctgagattgcgccattgcaccccagcctgggcaacaatagcgaaactgtctcagaaaaaagaaaaaaaaaatcgcaaaaagaaaaatctcataatgtcgttgttggtttttttttttttttttgagacagtctcactctgttgcccaggctggagtgcaatggcatgatctctgctcaccgcaacctctgcctcccgggttcaggtgattctcctgcctcagcctcccagatagctgggactacaggcacataccaccatgcctggctaatttttgtatttttagtagagatgggggtttcactgtgttggccaggctggtctcgaactcctgacctcatgatccacacacctcggcctcccaaagtcctgcgattacaggcgtgagctaccgcacccagccaagttgtaatttttaataaaacttaagaagtaaacattttacttatgtttataggtatttgatcctaaatttgacacatcattgcccatgaaagaatcctcttaggctgctcagcttcactcttcctgcttgcccaccggggtttttcactgcttctgttagcactaagtacttagacgatcctaagatatgtgcttgagccgaatttcatctttacttgtaggaaactttaaactatttcttttcttttcttttttttttttttttacttgagatggagttttgctcttgtcgcccaggctggagtgcagtggagtgatctcggctcactgcaacctctgcctcccgggttcaaatgattctcctgcctcagcctcccaagtagctgggattacaggtgtgcaccaccatgtctggctaattttgtatttttagtagagatggtttcaccatgttggtcaggctggtctcgaactcctgacctcaggtcatccacccacctcagcctcgcaaagtgctgagattacaggcatgagccacagcgcccagcttaaactattttcttggtctgtttttgattttcttttttccttgccactgcggtacagattttttttactcactgccactaaactaaagcaaggcatagtttatatgtgaagtgttcagagtttactgctataaggaaacttccaaatactgacatttaccttttagctgtagttattgggaccatgtgctctggttttctggagactgccaaattgctcccatttttctgcatcccacctggtttctttctgcatgtcccctttcactttcaaacctcttcatttggatgttaaattatatggtcacctagttataggtaagccttgttcgagttgatatcttgattgtgaggaaggatctgtgtcattggagcttgtttctgctgcaacgtgctgtagactatgaataatgaaatcacaccacattaccatcagatttcttgttttagttgtcaaattaatatttatgattgttatcttgggcgaaaagttcagagcagagatgacaaatcattagaacaacgatgaatttcagtattacggctaaaaagttcttctgtctgaatattaactcactctccttccagtgtacttcacagtaattggtatgcttttttatttaatgcttaaatcaaactttataaaaatcttagaccagatctttaatatggtatgccatttccccagtctaccaatggaatagtatgggtttctaatcctaggcttgtacaatggattggagttgagccatgccagcctccacactgccactaacttctgtaatgtaagattgagtcactgccaagcatttgaaatatgcagttgtgttttaattataatttatgtatagttagatgtatgtagtgcattgtgtggtattatttggtttgtaagaatttatttttaagggtcaaggtcatttgtaacattttgtgtgtgtcaattcaatgcaatgttggctgccttttgaagtctttgatatattggtgaatattcttctgatctataatacaaagctatgtaatgttacctcttgactcgcttttgaaaggaagacaattgttaactagatatttgagttttttcccctcagaattatgtgaatttctgatatatggctttagatactgtgaatctgttttccatttagtcagttatctgcttaaattgttcagaactatatcctaacgagcaattagttctgatggttctcccagtcatgagtgtgcatgtgtgcaagcatgttttgatcctgatgctacctttgctaaaaatggccatagattaggaactagctatgtttttagaatcaaagatgaaccggtaagctgtctcatgtaccaaacgtgaaatttacagtgtttacaaatgtctggaattttgcactgccatagggaatgttaaggttacttggctggaatttatcagacttgtgagtaaacaagttgaagtttagcagatgagggggaatattgaggcccctaaggctaaacaaaataatcagtatctgagatagtggctaatgtggctccccaggcctaatttgggaacagtttttcctgattgctttgagaagtactttcttttgacagaaattttcattctgcttgccattgctatattctccctttataggagccattggatttctttccttttgtgggaaatgtcccattagcattttcagatcttttgatgtgcactaatgccattattggtaatgccgttattggtgaatacagcatagttaaataaactgttacagtaaatctacacttggatttgctgcacctctaccaatagccttttgaatgactgaaagtgttaacagagaaagaggcatgtctgcagaaagagatagctaatattttttggtactttatctgaaatccaagatgctgcttcccctgcaggttgttttccttcttacgatcctcattgaatcccctctgggagcacaggacagttagtagaactctccatttctttttttttttttttagacggagtctctctctgtcgccccggctggagtgcagtggcgcgatctcggctcactgcaacctccgcctcccgggttcaccccattctcctgcctcagcctccctagtagctgggactataggcgcccgccaccacgcctggctaatttttgtatttttattggagacggggtttcaccgtcttagccaggatggtcttgatctcctgacctcgtgatctgcccacctcagcctcccaaagtactgggattacaggcgtgagccaccgcgcccggccggaactctccatttcttaaggtaaagagggtcaaggatacctaaaaagggtcaaataatgctagaagagcaattcctctttcagagcagttgctgtaatttggcaaatgctttatcgaagattgatattaggctaggggcggtggcttacgcctgtaatcccagcactttgggaggccgaggtgggtggattgcctgagctcaggagttcgagaccagtctgaccagtatggtgaaaccctgtctctactaaaaatacaaaaattagccggtcgtggtggcgtgcacctgtagtcccagctacttggcaggttgagacaggagaatcgcttgaacctgggaggtggaggttgcagtgagccgagactgcaccactgcgctcccacctgggtgacagagactctgtctcaaaaaaaaggacatttatcattataacatcttattagagcccctaatttcttatctgaaggcactgtttttttttttaaacagttaagtactgatgtcaacagacaaatatttctgatcagatagtcccctgtcaacagtagcaaatgtggtttcataaagtgggaagaaaacagcattttaaagtaactttttgggagactgatttgagtaataataaaactctggtctcccttaagaaaaaaaaacccttccacctttactgtgtcatttatatccccttagttccaaagttaattatcttatttctggatattgcttttataccaaagacccttatcagcccttgtaactacagtatctttagataagattcctctttccagtcagtcctgggaaatgtttctgttgcagagttaggcggtagatgggaagctgtgatggcagagctactatctaataaagtaacaactcgtagttgaggcttcctttctgtgtgtgatgggggatagggagttagctcccctgttgtctcagcactaagaaattgaggtcaggccaggcgcggtggttcactcctgttattccagcactggggtggccaaagtgggcagattgcttgcgctctggagctcgagaccagcctgggcaacatggtgaaaccctgtctctaccaaaaatacaaaaaaaaagctgggcatggtgggtgcatgcttgtcccagctactgaggaggctgaggtgggaggatcgcttgagcctgggaggtggaggttgcagtgagctgagatggcaccactgcaatccaaggtgggtgacagagacgctgtctcaaagaaattgaggtcaggcttccttcttacagaattatttttttctctgtagtttgcctcattttttcactttcttttcaatgagaatcgaagtgtttcttttgggtttttttttcccccttttaaaatcaacaggaaatgtttcaaaggagggatgaaatgcttcttggcttcctcagcacttggcaaggtagacctcatagcaaccttgaatatgactttctttagtctctagctatgcactattaagtgcctcttgggtagaggtagagttaagtattgagtgccagtcttgacgtccgtatgcctcagtttttctcatatataaaaagcagtatacatacctacccttttctacctcatcatttgttgtagggattaaatccgggagagcaattctgaagcctataaatttccttgaagagatctaagaacctattatgctcttggtgtaccaagctctggggtatatattcagaatacctcatgttctggaagctgagcactagctcccctttattgcctgcctggcagagcctgtttgattactgcaggcccttttacccatgcttctagtttaggtattctttctttgatatgaggctcttgaccagaaaagagttctttctctaggtgttctgagagaagtttgtaaatttggatagtacattctatcctgataaaaccaccttgctgtggtcttgatgtacaaaaaaaaattttttttttgagacagagtcttactctgtcacccaggctggaatgcagtggcgcaatcttggttcactgcaacccccgcctcctgggttcaagcgatcctcctgcctcaacctctcaagtagctgggactacaggcgtgcaccaccacacctggctaattttgtatttttagtagagacagggtttcaccatgttggccaggctggtcttgaactcctgacctcaggcgatctgcccgccttggcctcccaaagtactgggattacaggcgtgagcaactgctcctggcccaaaacatctctttctacatacacttgagtaggtggcataaaatgcactgtcaatatatagaaaacatgaaattttccaaatatttccgatcagagaatcacaagagcagcaaatgtggtttcatcaagtgggaagaaagcagcaatttaaaataactttttgggagactgaattgagtaataataaaacttcagtctttcgctaataataataataataataataataacaacaacttattgaatgtggccagctcactagatgaggaaagaggaaggcattttctgcattcttgcctagttttccttataagcaccactaagttaatagctctgtctttttggtgtttgcactatgtaatgcttttaatactttttaattgtgcttttttatgtattaaatgtttttccttttgcca

SEQ ID NO: 205 - DNA, 5391 bp, HOMO SAPIENS
cgcggccgcgagatccgtgtgtctcccaagatggtggcgctgggctcggggtgactacaggagacgacggggccttttcccttcgccaggacccgacacaccaggcttcgctcgctcgcgcacccctccgccgcgtagccatccgccagcgcgggcgcccgccatccgccgcctacttacgcttcacctctgccgacccggcgcgctcggctgcgggcggcggcgcctccttcggctcctcctcggaatagctcgcggcctgtagcccctggcaggagggcccctcagccccccggtgtggacaggcagcggcggctggcgacgaacgccgggatttcggcggccccggcgctccctttcccggcctcgttttccggataaggaagcgcgggtcccgcatgagccccggcggtggcggcagcgaaagagaacgaggcggtggcgggcggaggcggcgggcgagggcgactacgaccagtgaggcggccgccgcagcccaggcgcgggggcgacgacaggttaaaaatctgtaagagcctgattttagaattcaccagctcctcagaagtttggcgaaatatgagttattaagcctacgctcagatcaaggtagcagctagactggtgtgacaacctgtttttaatcagtgactcaaagctgtgatcaccctgatgtcaccgaatggccacagcttgtaaaagagagttacagtggaggtaaaaggagtggcttgcaggatggagaagctgcaccagtgttattggaactcttctgtctgggagatacaagtttggaagcaatcttggggtacttacccacaaggctggtggagaccagatcaggagaacctcagtctgacgacattgaagctagccgaatgaagcgagcagctgcaaagcatctaatagaacgctactaccaccagttaactgagggctgtggaaatgaagcctgcacgaatgagttttgtgcttcctgtccaacttttcttcgtatggataataatgcagcagctattaaagccctcgagctttataagattaatgcaaaactctgtgatcctcatccctccaagaaaggagcaagctcagcttaccttgagaactcgaaaggtgcccccaacaactcctgctctgagataaaaatgaacaagaaaggcgctagaattgattttaaagatgtgacttacttaacagaagagaaggtatatgaaattcttgaattatgtagagaaagagaggattattcccctttaatccgtgttattggaagagttttttctagtgctgaggcattggtacagagcttccggaaagttaaacaacacaccaaggaagaactgaaatctcttcaagcaaaagatgaagacaaagatgaagatgaaaaggaaaaagctgcatgttctgctgctgctatggaagaagactcagaagcatcttcctcaaggataggtgatagctcacagggagacaacaatttgcaaaaattaggccctgatgatgtgtctgtggatattgatgccattagaagggtctacaccagattgctctctaatgaaaaaattgaaactgcctttctcaatgcacttgtatatttgtcacctaacgtggaatgtgacttgacgtatcacaatgtatactctcgagatcctaattatctgaatttgttcattatcgtaatggagaatagaaatctccacagtcctgaatatctggaaatggctttgccattattttgcaaagcgatgagcaagctaccccttgcagcccaaggaaaactgatcagactgtggtctaaatacaatgcagaccagattcggagaatgatggagacatttcagcaacttattacttataaagtcataagcaatgaatttaacagtcgaaatctagtgaatgatgatgatgccattgttgctgcttcgaagtgcttgaaaatggtttactatgcaaatgtagtgggaggggaagtggacacaaatcacaatgaagaagatgatgaagagcccatccctgagtccagcgagctgacacttcaggaacttttgggagaagaaagaagaaacaagaaaggtcctcgagtggaccccctggaaactgaacttggtgttaaaaccctggattgtcgaaaaccacttatcccttttgaagagtttattaatgaaccactgaatgaggttctagaaatggataaagattatacttttttcaaagtagaaacagagaacaaattctcttttatgacatgtccctttatattgaatgctgtcacaaagaatttgggattatattatgacaatagaattcgcatgtacagtgaacgaagaatcactgttctctacagcttagttcaaggacagcagttgaatccatatttgagactcaaagttagacgtgaccatatcatagatgatgcacttgtccggctagagatgatcgctatggaaaatcctgcagacttgaagaagcagttgtatgtggaatttgaaggagaacaaggagttgatgagggaggtgtttccaaagaattttttcagctggttgtggaggaaatcttcaatccagatattggtatgttcacatacgatgaatctacaaaattgttttggtttaatccatcttcttttgaaactgagggtcagtttactctgattggcatagtactgggtctggctatttacaataactgtatactggatgtacattttcccatggttgtctacaggaagctaatggggaaaaaaggaacttttcgtgacttgggagactctcacccagttctatatcagagtttaaaagatttattggagtatgaagggaatgtggaagatgacatgatgatcactttccagatatcacagacagatctttttggtaacccaatgatgtatgatctaaaggaaaatggtgataaaattccaattacaaatgaaaacaggaaggaatttgtcaatctttattctgactacattctcaataaatcagtagaaaaacagttcaaggcttttcggagaggttttcatatggtgaccaatgaatctcccttaaagtacttattcagaccagaagaaattgaattgcttatatgtggaagccggaatctagatttccaagcactagaagaaactacagaatatgacggtggctataccagggactctgttctgattagggagttctgggaaatcgttcattcatttacagatgaacagaaaagactcttcttgcagtttacaacgggcacagacagagcacctgtgggaggactaggaaaattaaagatgattatagccaaaaatggcccagacacagaaaggttacctacatctcatacttgctttaatgtgcttttacttccggaatactcaagcaaagaaaaacttaaagagagattgttgaaggccatcacgtatgccaaaggatttggcatgctgtaaaacaaaacaaaacaaaataaaacaaaaaaaaggaaggaaaaaaaaagaaaaaatttaaaaaattttaaaaatataacgagggataaatttttggtggtgatagtgtcccagtacaaaaaggctgtaagatagtcaaccacagtagtcacctatgtctgtgcctcccttctttattggggacatgtgggctggaacagcagatttcagctacatatatgaacaaatcctttattattattataattatttttttgcgtgaaagtgttacatattctttcacttgtatgtacagagaggtttttctgaatatttattttaagggttaaatcacttttgcttgtgtttattactgcttgaggttgagccttttgagtatttaaaaaatatataccaacagaactactctcccaaggaaaatattgccaccatttgtagaccacgtaaccttcaagtatgtgctacttttttgtccctgtatctaactcaaatcaggaactgtattttttttaatgatttgcttttgaaacttgaagtcttgaaaacagtgtgatgcaattactgctgttctagcccccaaagagttttctgtgcaaaatcttgagaatcaatcaataaagaaagatggaaggaagggagaaattggaatgttttaactgcagccctcagaactttagtaacagcacaacaaattaaaaacaaaaacaactcatgccacagtatgtcgtcttcatgtgtcttgcaatgaactgtttcagtagccaatcctctttcttagtatatgaaaggacagggatttttgttcttgttgttctcgttgttgttttaagtttactggggaaagtgcatttggccaaatgaaatggtagtcaagcctattgcaacaaagttaggaagtttgttgtttgtttattataaacaaaaagcatgtgaaagtgcacttaagatagagtttttattaattacttacttattacctagattttaaatagacaatccaaagtctccccttcgtgttgccatcatcttgttgaatcagccattttatcgaggcacgtgatcagtgttgcaacataatgaaaaagatggctactgtgccttgtgttacttaatcatacagtaagctgacctggaaatgaatgaaactattactcctaagaattacattgtatagccccacagattaaatttaattaattaattcaaaacatgttaaacgttactttcatgtactatggaaaagtacaagtaggtttacattactgatttccagaagtaagtagtttcccctttcctagtcttctgtgtatgtgatgttgttaatttcttttattgcattataaaataaaaggattatgtatttttaactaaggtgagacattgatatatccttttgctacaagctatagctaatgtgctgagcttgtgccttggtgattgattgattgattgactgattgttttaactgattactgtagatcaacctgatgatttgtttgtttgaaattggcaggaaaaatgcagctttcaaatcattggggggagaaaaaggatgtctttcaggattattttaattaatttttttcataattgagacagaactgtttgttatgtaccataatgctaaataaaactgtggcacttttcaccataatttaatttagtggaaaaagaagacaatgctttccatattgtgataaggtaacatggggtttttctgggccagcctttagaacactgttagggtacatacgctaccttgatgaaagggaccttcgtgcaactgtagtcatcttaaaggcttctcatccactgtgcttcttaatgtgtaattaaagtgaggagaaattaaatactctgagggcgttttatataataaattcgtgaagaaatgtgtgctcttcagttctcaagttttattattatggtatttattaaagttctacaattgtaata

SEQ ID NO: 206 - DNA, 3125 bp, HOMO SAPIENS
gagcagtccgtcttcaaggtccagataacatgagaaatgaagcttctcacatcgttgttggggatgacggactgtagttgatgggttagcggaatttcaaactgatcacctggggatgagagcaatgggtaactgaagcttttgggctcgggggacaggtcagtgcccacgttgttgtattcccattttgtctcagtttgtttaacagttggctctaagttgaatgcagtcctagtgggaatctgcctcaggaagatgattgtagtttgtgttttcagagatggtgccttctggcatagtagtgttttccataaaaacgttttcttcagaggcatttcttgcagttgtgttttttacagtagtgttttctataaaacattctgaaggagcaaatacttctggaaaagggttttcttgaggactcaggtctcctgaggatgaaaaagccccttgtgaaggggaatttatgaggctcttcactgcagagaacggcggcctctttgcgagcatcagtctattgagataacttttctttctcaattttctaatctttttggccttgggtgttctgtgggccacacgggagtgagttttatgaaagtggtatttttttctggaatgtacgactcgtttagcagccttcatattttttaactctagcctttgcattttctaaaattaaaatggtgtaggctaagtctttcaatctgtctatgacctgaggtagggcttttgcagttgtggaaggcagaaggcatgcccatggagaagggtttcagcaaagaggagactgttggcttctgctcttgggtgaatgaaggcttggtgtagacggcgtttcccgctacgttctcgggcccctgcactatgtgaggctattccagctcccttggggctggactcccgagccttttttctttggcagcattctccccaaatgcctgggcaccctgttccctcctgatactctgctttcccaccgctttgaagggccttttctggatgctccttgggcccatgaggactctgttcactctctgcaggtttttgcctacactttgaacctttgccaggctgttttcctgtggttggacagtttctaatttcttttcaaatatttggcatttaaatttgttacctagaaggctggactgcataagcatggcagttttttcttcccttttaacttcatcgatttttttcttgtatttctgcatctaacatcttttctagcaaatacacctttctcaatttattttcataagttgaattgttggatgcaggttgaaacaaggggctctttgtattgtttttcaaaacaggagcttatctccatcttgcacatttgaaaaaagcagtttaatgaatggtaacaacattgattccgcatctagatttcctgctgagaaataaggcaagatgtaatttagcgcagtgataacatcactcttatcataagtgtctagctgctcactcccaaagactgacaagttgatgccactgctgtctgaggctgcctccggctcagtagtcagctcaatgctcatgtgcttcttctgggcttgtaacaccttcatgaacactctttctggattccctacagatgcttcttcacctgtcaaaaaaaagagactgctttgatcatgaaagataatggaacggcatgcatcagtccacagctgtatgccccagtcacacaaagtaggagtcagcaaacattagagtgccattcagagaggagaaacacacacccaagcctaaatctatgaaatggcaacaacaaaaggaggaaaagacatcttttgaaaatatggctacttacttggaacattcctagtgtgacatagagtaactctgcttaggattatttcgttgatccccaggggccaattgcccagtgctcagtcaaagcccaaggtggaagacaagtgcttccctgatgagctgtcctctctgcagactgctccgtaccctgtgctgtcctgcctcagatgcagagagagcacaagcctccctcctcatcctcagtgtgcctgtgttcttactaccatcacagctgaatgcaatgaaaggctatcctctgagaggagcagggtggagatgctaaagtggaggccccctcccattgctgatagatcctcatctggcatgcactccacccacccaccccattctctgctaccacatatcgtagccccattaaagaagaagtgacatggaaaaaacactgtgcccaccctagtccttttcttaaatttgggcagagatccagggtataggttaagagatttttaatttgccagatggtatgcctatgttgttaaatatacaatgaatctatggtatgatagcagtttctggataaacattacttgaggtcctaaaatgcagaagggaaaaagcagcttttgtcagatgcttactttgctttcatttcatctctaatattttggatggggaaccatccaaagcttctggccgcatgaaggtcaagtgtgccagtgtgcagctgggtttcttttccagaattaaaagtattttgggtggtgctgagggtcagaggaagaagtaaaaattgtgagaaaggagaaacatgggcttggggagaacccagaattggggacagaagacctggcactaagctatagcacttagcacctctgatcttgtttttcctcgtccgtaaaaggagattaacaatgcttttctgcccacctcttggggagaagggaataatttagttggtaaaaaaaaaacttttgaataataagcaactctgtctttatataagtagccaagcattattaattatccaccccatatcactggtagatacctgtattcaagctatgtggacataaaagcagtcacattttagaagtcatgaagttggtgctaataaacctaatctacagaaaaactcttgaaagcacttgagcatttgttctgtgaatagaaaggtttgagattcagagcaagttcagagttggatggtctaagaatggaaaagccctccattccattagaagagccagggagcaatttctggttatggaaccagaagctctcaggcttcaaataaaacagcatcacttgtactcttataaaattgtaaaaacaaaaac

SEQ ID NO: 207 - DNA, 1607 bp, HOMO SAPIENS
gggaagggcagctaacgctggacactgggacggccgcggcggcagcttcaagaccatggcccagctcggaggggccgcgaaccgggcacccacggcctctctcgcgccgacctcgcagagcctgcggtgcgccccgcagccccgcccctcgagagcggacactggtagcctgggcaggtactggggcaaagccgcagccgccgcctcccgggagcaccccttcccaggcacgctgatgcactctgcagcgggctcagggcgccggcggggagcgctgcgggaactgctggggctgcagcgggcggctcctgcggggtggctgtcggaggagcgcgccgaggagctgggcgggccgagtgggccgggcagcagcaggctgtgcctggaaccgcgggagcacgcgtggattctggcagccgccgagggccgctatgaggtgctgcgggagctgctggaggctgagccggagctgctgctgcggggcgacccgatcaccggctactcggttctgcactggctggccaagcacgggcgccacgaggagctcattctggtacacgatttcgccctacgccgggggctgaggctcgacgtgagcgccccaggcagcggcggcctcacgcccctccacctggcggcccttcagggccacgacatggtcatcaaggtgctggtgggcgccctgggtgctgacgctacgcgccgcgaccacagcggccaccgggcctgccactacctgcggcccgacgcgccttggaggttgcgggagctgtcgggagccgaggaatgggagatggagagcggcagcgggtgcaccaacctgaacaacaacagcagtggcaccactgcgtggagggccgcgagcgcagtgggcgcgacggctgtggagacaagcaggagagtggcagcgtcgcggaccaaggcgaaggacaccgcgggcagccgggtggcgcaaatgcatagccttttccgccatctgttcccctcattccaggaccgttgacagggacagagactggagagctaggaggggctgtgacactgtggcgatggctaggtcctgggttgtcccgggttccaccgaaggagaggcgccttggacgctgcttgggcctgcaaggaacagaacacgtcggggtccgactcaggtacttgtctcaggtctcctgtaaccaccggcctggaggacccggggactcgggcaccacctcaccaagagagagtgaaggaccaagctggcctggctccgagttccaaagctacaggactaaggagttgggagcagggagcgtggtcctgcttgggagagggcaagttaagcttccaggggccatttctgggcaggccgacgcgctgggtttattaggaaacattcgctagaagaatgagttaagattgtaaaccaccaatgcagagaaaacgcctaactctgccggcctcgctcggccattaatgggtcttggggtgcgggtagagtcagcctctgacaacctcctcctgagacgacccagccttactggtactttttctcatgtatcacaggttacttcttatgtatattaaagtggaatatgtgttcttttcacatgaaaaaaaaaaaaaaaaaa

SEQ ID NO: 208 - DNA, 1286 bp, HOMO SAPIENS
gccggcggaggtggggcgggtgccgccgaggtagccacgcagcccctgtgcgcctccggcccggcccagcgacctcctctcgggcctgccgttacccggtcccctcctgccaccacccgctacccggccaccccgagtccgcctggggtggccgaacgtatggagctgggctccagggtgcacggggatggggggtgaggagcggggcgttctccctcccagcaccccccagctgactctgtgcccggagggggtgtgtgagccggaacctccagcattcttggggatacgaacttccaacgctgggcagcctcttaaggcttctaggaattcgcatccccagcgccccagccagcagatcggttgcgagagggaccgttcgggtccgcggggccgggaatggaggtgggagggcggggccgaggcggcggccgcctgcggactggagacccgggaggacggacgcggacgcgggctgctcgtcttttacggcccttcaacgcccaccacgacccactcctcttggagaccccgggcgacggtggggctcttgggcattctgagactgcgcttggtggagaccccgggcgacggtggagctcttgggcattctgagactgcgcttggtggagccccctactggccagactggatttctcagcctgcgactcagccccaggctacacgaaagaagccagacctgggtaattcttctagttcttttttttttttttttttaattgcactgggaaacttccccaatctcggccccagttctttctccaaactaaggagtcatggcctttcgcccgctagtccagtatgcacccgtaggcgcttcattttctctcctcttgtcagcttttactgcctcctgaggccttcgtcttgttcacactgagtgtccagtccctccaaatccggctacactctactggcaaggagcacctgggccatgttttagagatcatccgaggactaaccccaaaagtttatgaagagaaagcagaggccgagctgaagagatggacccgggtcacacccaggtaaaggcaggatctaaactgaaactggtgtcagatctggttgccttgcacccctgatatcaggtgaagcaacactgggcaggatagagcagagtgaggtcagagtgtgaagatccagcctgatgcccaaactgacgcctcttcattctcccctgctccatctgtaaacgtcacggttaatccatctactttattgcattatatagagaaataaatgaaatgtcatagctgtatgctcta

SEQ ID NO: 209 - DNA, 309 bp, HOMO SAPIENS
cagtgtaggctccaaacagattccttgggaaagccccagggcactgtggccagggttcacataggccaagtcatcatgtccatgcgcaccaagctgcagaacaagcagcttgtgattgaggacctatgcagggccaagttcaagttacttggctgccagaagatccgcatctcaaagaagtggtgctttaccaaattcaaggtggatgaatttgaagatacggtggctgagaagtggctcctcctacatggctgtggggccaagtacatccccagtcgtggtcctctggacaagtgtccggccctgctc

SEQ ID NO: 210 - DNA, 615 bp, HOMO SAPIENS
gaggcgccgatggtcgttgtgggagtcggtctcggtccggcaccccagaactccaactggcagacaggcatgtgtgactgcttcagcgactgtggagtctgcctctgtggcacgttttgtttcccgtgccttgggtgtcaagttgcagctgatatgaatgaatgctgtgtggagcaagcgtcgcaatgaggactctctacaggacgtgatatggcatccctggatctatttgtgatgattatatggcaaccctttgcggtcctccttgtactctttgccaaatcaagagagatatcaacagaaggagagtcatgcgtactttctaaaaactgatggtgaaaagctcctaccgaagcaacaaaattcagcagacacctcttcagcttgagttcttcaccatcttttgcaactgaaatatgatggatatgtttaagtacaactgatggcatgaaaaaaatcaaatgtttgatttattataaatgaacgttgtccctgagcttagctaaatggtgcgacttagtttctccctgctttcatattatcgaatttcctgtcttatagactttttaaattacatttgaaatataaaccaaataaaagattttactgataaga

SEQ ID NO: 211 - DNA, 1644 bp, HOMO SAPIENS
ggccggcggcagagctgtccggctgcgcggtggcccggggggcccgggcggcagggcaagcagcgcggcctcggcctatgcgaccggtggcgccggcgcggcttctgcctggagaggattcaagatgaccaacgaagaacctcttcccaagaaggttcgattgagtgaaacagacttcaaagttatggcaagagatgagttaattctaagatggaaacaatatgaagcatatgtacaagctttggagggcaagtacacagatcttaactctaatgatgtaactggcctaagagagtctgaagaaaaactaaagcaacaacagcaggagtctgcacgcagggaaaacatccttgtaatgcgactagcaaccaaggaacaagagatgcaagagtgtactactcaaatccagtacctcaagcaagtccagcagccgagcgttgcccaactgagatcaacaatggtagacccagcgatcaacttgtttttcctaaaaatgaaaggtgaactggaacagactaaagacaaactggaacaagcccaaaatgaactgagtgcctggaagtttacgcctgataggtaaacaaatcatactccccagtcaagacttccctgacagtcccactacgagaaagctgtggtgggacagccaagtactcgtttccacaccaagactcagactttttgagccaaaaaaaagccacattcttacactgtccagcttgtaatggttaatgtaaaacttaccagatgaaccttgtgtttcagcttttttcttttccccttccccttgcttcagaggcctgatggcgtcggactattccgaagaagtggccacctccgaaaaattccccttctagaacatgtagacacttgagaaatgtttctgtttgaagaaaatagagggagaaacagaagtcttaagtctgtggcacactgtgtcttcagacagtttgaaggaatgaaaacctagagattttaaatcatgaattgaacatgtaaaattccagtaaaatgtaaaaacggaatatgcatcgctcttaaccttgagcatagtgacttagagacactgtgtatcagttttgccaataagactgtggacttcatgattgttgttgaacttctgggtcaaaactcaaatgaggtgaattttgcctttaaagggtttatttgctgagaaccaactttcaatagtcatgagagaatcaaataatagatgtccgtacaagtagcgcatatatttaaccatttagtttggggctctatattacttgcttgagccttaatcaatgtggttttattcaatggtttgttctttgaatggttgcaaaaactgtagataatcttactgaggactgtacaaacatgaaggtgtggtatcaaacttcaggttgaaactgtttgaagcattataaacattcatttcacaactagattgtataaggatattagctgtgatgagactcactgcattattttttttagtgaattttatgaaatccccgttccattcaacaggcacatgtttaaaagagctttgtcgttggtgttaatgggggaatgtgttccttcattgtatttgggccttttgtattgcactcttgatattaaattaaatgtgccttgaaataaaaaaaaaaaaaaaaa

SEQ ID NO: 212 - DNA, 6593 bp, HOMO SAPIENS
gcggaggaaggagactagagcaggaagagcagcggcgaggcggcggtggtggctgagtccgtggtggcagaggcgaaggcgacagctctaggggttggcaccggccccgagaggaggatgcgggtccggatagggctgacgctgctgctgtgtgcggtgctgctgagcttggcctcggcgtcctcggatgaagaaggcagccaggatgaatccttagattccaagactactttgacatcagatgagtcagtaaaggaccatactactgcaggcagagtagttgctggtcaaatatttcttgattcagaagaatctgaattagaatcctctattcaagaagaggaagacagcctcaagagccaagagggggaaagtgtcacagaagatatcagctttctagagtctccaaatccagaaaacaaggactatgaagagccaaagaaagtacggaaaccagctttgaccgccattgaaggcacagcacatggggagccctgccacttcccttttcttttcctagataaggagtatgatgaatgtacatcagatgggagggaagatggcagactgtggtgtgctacaacctatgactacaaagcagatgaaaagtggggcttttgtgaaactgaagaagaggctgctaagagacggcagatgcaggaagcagaaatgatgtatcaaactggaatgaaaatccttaatggaagcaataagaaaagccaaaaaagagaagcatatcggtatctccaaaaggcagcaagcatgaaccataccaaagccctggagagagtgtcatatgctcttttatttggtgattacttgccacagaatatccaggcagcgagagagatgtttgagaagctgactgaggaaggctctcccaagggacagactgctcttggctttctgtatgcctctggacttggtgttaattcaagtcaggcaaaggctcttgtatattatacatttggagctcttgggggcaatctaatagcccacatggttttgggttacagatactgggctggcatcggcgtcctccagagttgtgaatctgccctgactcactatcgtcttgttgccaatcatgttgctagtgatatctcgctaacaggaggctcagtagtacagagaatacggctgcctgatgaagtggaaaatccaggaatgaacagtggaatgctagaagaagatttgattcaatattaccagttcctagctgaaaaaggtgatgtacaagcacaggttggtcttggacaactgcacctgcacggagggcgtggagtagaacagaatcatcagagagcatttgactacttcaatttagcagcaaatgctggcaattcacatgccatggcctttttgggaaagatgtattcggaaggaagtgacattgtacctcagagtaatgagacagctctccactactttaagaaagctgctgacatgggcaacccagttggacagagtgggcttggaatggcctacctctatgggagaggagttcaagttaattatgatctagcccttaagtatttccagaaagctgctgaacaaggctgggtggatgggcagctacagcttggttccatgtactataatggcattggagtcaagagagattataaacaggccttgaagtattttaatttagcttctcagggaggccatatcttggctttctataacctagctcagatgcatgccagtggcaccggcgtgatgcgatcatgtcacactgcagtggagttgtttaagaatgtatgtgaacgaggccgttggtctgaaaggcttatgactgcctataacagctataaagatggcgattacaatgctgcagtgatccagtacctcctcctggctgaacagggctatgaagtggcacaaagcaatgcagcctttattcttgatcagagagaagcaagcattgtaggtgagaatgaaacttatcccagagctttgctacattggaacagggccgcctctcaaggctatactgtggctagaattaagctcggagactaccatttctatgggtttggcaccgatgtagattatgaaactgcatttattcattaccgtctggcttctgagcagcaacacagtgcacaagctatgtttaatctgggatatatgcatgagaaaggactgggcattaaacaggatattcaccttgcgaaacgtttttatgacatggcagctgaagccagcccagatgcacaagttccagtcttcctagccctctgcaaattgggcgtcgtctatttcttgcagtacatacgggaaacaaacattcgagatatgttcacccaacttgatatggaccagcttttgggacctgagtgggacctttacctcatgaccatcattgcgctgctgttgggaacagtcatagcttacaggcaaaggcagcaccaagacatgcctgcacccaggcctccagggccacggccagctccaccccagcaggaggggccaccagagcagcagccaccacagtaataggcactgggtccagccttgatcagtgacagcgaaggaagttatctgctgggaacacttgcatttgatttaggaccttggatcagtggtcacctcccagaagaggcacggcacaaggaagcattgaattcctaaagctgcttagaatctgatgcctttattttcagggataagtaactcttacctaaactgagctgaatgtttgtttcagtgccatatggaataacaactttcagtggcttttttttttcttttctggaaacatatgtgagacactcagagtaatgtctactgtatccagctatctttcttggatccttttggtcattatttcagtgtgcataagttcttaatgtcaaccatctttaaggtattgtgcatcgacactaaaaactgatcagtgtaaaaaggaaaacccagttgcaagtttaaacgtgttcgaaagtctgaaaatagaacttgccttttaagttaaaaaaaaaaaaagctatcttgaaaatgttttggaactgcgataactgagaaactcttaccagtccacatgcaattagacatattcagcatatttgttattttaaaagggagggttgggaggtttcttattggtgattgtcacacggtataccatactcctctccttcaaagaatgaaaggccttgttaaggagttttttgtgagctttacttctttggaatggaatatacttatgcaaaaccttgtgaactgactccttgcactaacgcgagtttgccccacctactctgtaatttgcttgtttgttttgaatatacagagccttgatccagaagccagaggatggactaagtgggagaaattagaaaacaaaacgaactctggttggggtactacgatcacagacacagacatacttttcctaaagttgaagcatttgttcccaggatttattttactttgcatttctttttgcacaaagaacacatcaccttcctgaattctttaaatatgaaatatcattgccagggtatggcttacagtgactactattataatactaaaactcagagaatcaaagatggattaaactcagtggttgatgaaagccaaaacctgtttgtactgttctatactattcaggtatctttttatttctgatagttttatattataatagaaagccagccactgcttagctatcatagtcaccattttctcactgttaacattaggaaaatcaaggctactatgcttcaggattgtctggttaaatagtatgggaaaaaaactgaagagtttcacataattacacacgtgaaataattaaagcttaaactgaatttgtatttcattttattgtcagatggtggtgttcaccagcctgtatcttgtctgagactgcattcgtatctgagcaggttttctatgcctactgatgtcagtatgtttatactaaccttcatgcttttttcccagaatccctcatctgccagaaaacttgaaaagtttattgcttgtagagttgtactgctttgatttttgaagttggggtagtagttagaactagatttaactagtctataatgaacatgaaggcttttatatatgaagttgtatacctttttgtgtttagagaattatgggaaacctggtaagcaaaactttcctcccagataattgcttccaaattcgaagagttagtcaccaagagagccatatgtatgaaagcgtatctgtgaaaggtaggaaacttaccccccctaagtgtaatgttgctttaggcaactcttgtaaatagtgagacttgtttggtctcttacatgtagagatttgagtgcagttggtacagtactttggtgtctccaccactgtcccttctccccgcttcaaaataagtgtaatccacggtagcagccacacttcctttagaaggaactgttataatttatttaaaagttgaaaaaccacccaagatgactaccaactttcacttttttcttctgccatccaccctcatttttcctttagcaagatttttatatctaactttccttccctccattgagtacgtgctttgagaaaacatttcttaaaacagtgtgtgccacctaaggctggatgggaaagtgcagtcttgttgttcatataaaaacacacttcttattagtttaccacttgcctttttctattgttaatgttctgaatttccttttcttggcttgtttctacttcattttaccctgggtcacttgctgccagcagtttgtgaatggtgtctttcaaataacttagttcttatggcttcacttaaagactgtctcaaaaatactttgctctcttcttcttttttgttcatgggacatggtacctaagcaaataggagttgggtttggtttttctcctaaaataatgctcaatacttacctaatcaaatggcatccatttgaataaaatgacaataactaaagctagttaatgtcagtgacattaaactaactccaggattcaggagttttaatgttagaatttagatttaacagatagagtgtggcttcatttgtccatggtagcccatctctcctaagaccttttctagtctgtcttcctgccttcgaacttgatgacagtaaaaccctgtttagtattctcttgtgcatttggtttgttggttagccgactgtcttgaaactattcattttgcttctagttttattttacagaggtagcattggtgggtttttttttttttttctgtctctgtgtttgaagtttcagtttctgttttctaggtaaggcttatttttgattagcagtcaatggcaaagaaaaagtaaatcaaagatgacttcttttcaaaatgtattgtttagcacttaactcagatgaatttataaattattaatcttgatactaaggatttgttacttttttgcatattaggttaatttttaccttacatgtgagagtcttaccactaagccattctgtctctgtactgttgggaagttttggaaacccctgccagtgatctggtgatgatctgatgatttatttaaagagccgttgatgcctccaggaaacttaagtattttattaatatatatataggaatttttttttattttgctttgtctttctctcccttcttttatcctcatgttcattcttcaaaccagtgttttggaagtatgcatgcaggcctataaatgaaaaacacaattctttatgtgtatagcatgtgtattaatgtctaactacatacgcaaaaacttcctttacagaggttcggactaacatttcacatgcacatttcaaaacaagatgtgtcatgaaaacagcccctttacctgccaagacaagcagggctatatttcagtgacagctgatatttgttttgaaagtgaatctcataatatatatatgtattacacattattatgactagaagtatgtaagaaatgatcagaacaaaagaaaatttctattttcatgcaaatatttttcatcagtcatcactctcaaatataaattaaaatataacactcctgaatgcctgaggcacgatctggattttaaatgtgtggtattcattgaaaagaagctctccacccacttggtatttcaagaaaatttaaaacgatcccaaggaaagatgatttgtatgttaaagtgactgcacaagtaaaagtccaatgttgtgtgcatgaaaaggattccttggttatgtgcagggaatcatctcacatgctgtttttcctatttggtttgagaaacaggctgacactattctctttgattagaaaataaactcataaaactcataatgttgatataatcaagatgtaaccactataaatatgtagaagaggaagttttaaaagaccttaagctggcattgtgaaggaacaccatggtagactctttttgtaaatgtattttgtatttaatgaaatgcagtataaaggttggtgaagtgtaatataattgtgtaaacaaatcctgttaatagagagatgtacagaatcgttttgtactgtatcttgaaacttgtgaaataaagattccacctctggttatcctgtatgctgtaatataccacaaaaaaaaaaaaaaaa

SEQ ID NO: 213 - DNA, 10412 bp, HOMO SAPIENS
gtaattgcgagcgagagtgagtggggccgggacccgcagagccgagccgacccttctctcccgggctgcggcagggcagggcggggagctccgcgcaccaacagagccggttctcagggcgctttgctccttgttttttccccggttctgttttctccccttctccggaaggcttgtcaaggggtaggagaaagagacgcaaacacaaaagtggaaaacagttaatgaccagccacggcgtccctgctgtgagctctggccgctgccttccagggctcccgagccacacgctgggggtgctggctgagggaacatggcttgttggcctcagctgaggttgctgctgtggaagaacctcactttcagaagaagacaaacatgtcagctgctgctggaagtggcctggcctctatttatcttcctgatcctgatctctgttcggctgagctacccaccctatgaacaacatgaatgccattttccaaataaagccatgccctctgcaggaacacttccttgggttcaggggattatctgtaatgccaacaacccctgtttccgttacccgactcctggggaggctcccggagttgttggaaactttaacaaatccattgtggctcgcctgttctcagatgctcggaggcttcttttatacagccagaaagacaccagcatgaaggacatgcgcaaagttctgagaacattacagcagatcaagaaatccagctcaaacttgaagcttcaagatttcctggtggacaatgaaaccttctctgggttcctgtatcacaacctctctctcccaaagtctactgtggacaagatgctgagggctgatgtcattctccacaaggtatttttgcaaggctaccagttacatttgacaagtctgtgcaatggatcaaaatcagaagagatgattcaacttggtgaccaagaagtttctgagctttgtggcctaccaagggagaaactggctgcagcagagcgagtacttcgttccaacatggacatcctgaagccaatcctgagaacactaaactctacatctcccttcccgagcaaggagctggctgaagccacaaaaacattgctgcatagtcttgggactctggcccaggagctgttcagcatgagaagctggagtgacatgcgacaggaggtgatgtttctgaccaatgtgaacagctccagctcctccacccaaatctaccaggctgtgtctcgtattgtctgcgggcatcccgagggaggggggctgaagatcaagtctctcaactggtatgaggacaacaactacaaagccctctttggaggcaatggcactgaggaagatgctgaaaccttctatgacaactctacaactccttactgcaatgatttgatgaagaatttggagtctagtcctctttcccgcattatctggaaagctctgaagccgctgctcgttgggaagatcctgtatacacctgacactccagccacaaggcaggtcatggctgaggtgaacaagaccttccaggaactggctgtgttccatgatctggaaggcatgtgggaggaactcagccccaagatctggaccttcatggagaacagccaagaaatggaccttgtccggatgctgttggacagcagggacaatgaccacttttgggaacagcagttggatggcttagattggacagcccaagacatcgtggcgtttttggccaagcacccagaggatgtccagtccagtaatggttctgtgtacacctggagagaagctttcaacgagactaaccaggcaatccggaccatatctcgcttcatggagtgtgtcaacctgaacaagctagaacccatagcaacagaagtctggctcatcaacaagtccatggagctgctggatgagaggaagttctgggctggtattgtgttcactggaattactccaggcagcattgagctgccccatcatgtcaagtacaagatccgaatggacattgacaatgtggagaggacaaataaaatcaaggatgggtactgggaccctggtcctcgagctgacccctttgaggacatgcggtacgtctgggggggcttcgcctacttgcaggatgtggtggagcaggcaatcatcagggtgctgacgggcaccgagaagaaaactggtgtctatatgcaacagatgccctatccctgttacgttgatgacatctttctgcgggtgatgagccggtcaatgcccctcttcatgacgctggcctggatttactcagtggctgtgatcatcaagggcatcgtgtatgagaaggaggcacggctgaaagagaccatgcggatcatgggcctggacaacagcatcctctggtttagctggttcattagtagcctcattcctcttcttgtgagcgctggcctgctagtggtcatcctgaagttaggaaacctgctgccctacagtgatcccagcgtggtgtttgtcttcctgtccgtgtttgctgtggtgacaatcctgcagtgcttcctgattagcacactcttctccagagccaacctggcagcagcctgtgggggcatcatctacttcacgctgtacctgccctacgtcctgtgtgtggcatggcaggactacgtgggcttcacactcaagatcttcgctagcctgctgtctcctgtggcttttgggtttggctgtgagtactttgccctttttgaggagcagggcattggagtgcagtgggacaacctgtttgagagtcctgtggaggaagatggcttcaatctcaccacttcggtctccatgatgctgtttgacaccttcctctatggggtgatgacctggtacattgaggctgtctttccaggccagtacggaattcccaggccctggtattttccttgcaccaagtcctactggtttggcgaggaaagtgatgagaagagccaccctggttccaaccagaagagaatatcagaaatctgcatggaggaggaacccacccacttgaagctgggcgtgtccattcagaacctggtaaaagtctaccgagatgggatgaaggtggctgtcgatggcctggcactgaatttttatgagggccagatcacctccttcctgggccacaatggagcggggaagacgaccaccatgtcaatcctgaccgggttgttccccccgacctcgggcaccgcctacatcctgggaaaagacattcgctctgagatgagcaccatccggcagaacctgggggtctgtccccagcataacgtgctgtttgacatgctgactgtcgaagaacacatctggttctatgcccgcttgaaagggctctctgagaagcacgtgaaggcggagatggagcagatggccctggatgttggtttgccatcaagcaagctgaaaagcaaaacaagccagctgtcaggtggaatgcagagaaagctatctgtggccttggcctttgtcgggggatctaaggttgtcattctggatgaacccacagctggtgtggacccttactcccgcaggggaatatgggagctgctgctgaaataccgacaaggccgcaccattattctctctacacaccacatggatgaagcggacgtcctgggggacaggattgccatcatctcccatgggaagctgtgctgtgtgggctcctccctgtttctgaagaaccagctgggaacaggctactacctgaccttggtcaagaaagatgtggaatcctccctcagttcctgcagaaacagtagtagcactgtgtcatacctgaaaaaggaggacagtgtttctcagagcagttctgatgctggcctgggcagcgaccatgagagtgacacgctgaccatcgatgtctctgctatctccaacctcatcaggaagcatgtgtctgaagcccggctggtggaagacatagggcatgagctgacctatgtgctgccatatgaagctgctaaggagggagcctttgtggaactctttcatgagattgatgaccggctctcagacctgggcatttctagttatggcatctcagagacgaccctggaagaaatattcctcaaggtggccgaagagagtggggtggatgctgagacctcagatggtaccttgccagcaagacgaaacaggcgggccttcggggacaagcagagctgtcttcgcccgttcactgaagatgatgctgctgatccaaatgattctgacatagacccagaatccagagagacagacttgctcagtgggatggatggcaaagggtcctaccaggtgaaaggctggaaacttacacagcaacagtttgtggcccttttgtggaagagactgctaattgccagacggagtcggaaaggattttttgctcagattgtcttgccagctgtgtttgtctgcattgcccttgtgttcagcctgatcgtgccaccctttggcaagtaccccagcctggaacttcagccctggatgtacaacgaacagtacacatttgtcagcaatgatgctcctgaggacacgggaaccctggaactcttaaacgccctcaccaaagaccctggcttcgggacccgctgtatggaaggaaacccaatcccagacacgccctgccaggcaggggaggaagagtggaccactgccccagttccccagaccatcatggacctcttccagaatgggaactggacaatgcagaacccttcacctgcatgccagtgtagcagcgacaaaatcaagaagatgctgcctgtgtgtcccccaggggcaggggggctgcctcctccacaaagaaaacaaaacactgcagatatccttcaggacctgacaggaagaaacatttcggattatctggtgaagacgtatgtgcagatcatagccaaaagcttaaagaacaagatctgggtgaatgagtttaggtatggcggcttttccctgggtgtcagtaatactcaagcacttcctccgagtcaagaagttaatgatgccatcaaacaaatgaagaaacacctaaagctggccaaggacagttctgcagatcgatttctcaacagcttgggaagatttatgacaggactggacaccaaaaataatgtcaaggtgtggttcaataacaagggctggcatgcaatcagctctttcctgaatgtcatcaacaatgccattctccgggccaacctgcaaaagggagagaaccctagccattatggaattactgctttcaatcatcccctgaatctcaccaagcagcagctctcagaggtggctctgatgaccacatcagtggatgtccttgtgtccatctgtgtcatctttgcaatgtccttcgtcccagccagctttgtcgtattcctgatccaggagcgggtcagcaaagcaaaacacctgcagttcatcagtggagtgaagcctgtcatctactggctctctaattttgtctgggatatgtgcaattacgttgtccctgccacactggtcattatcatcttcatctgcttccagcagaagtcctatgtgtcctccaccaatctgcctgtgctagcccttctacttttgctgtatgggtggtcaatcacacctctcatgtacccagcctcctttgtgttcaagatccccagcacagcctatgtggtgctcaccagcgtgaacctcttcattggcattaatggcagcgtggccacctttgtgctggagctgttcaccgacaataagctgaataatatcaatgatatcctgaagtccgtgttcttgatcttcccacatttttgcctgggacgagggctcatcgacatggtgaaaaaccaggcaatggctgatgccctggaaaggtttggggagaatcgctttgtgtcaccattatcttgggacttggtgggacgaaacctcttcgccatggccgtggaaggggtggtgttcttcctcattactgttctgatccagtacagattcttcatcaggcccagacctgtaaatgcaaagctatctcctctgaatgatgaagatgaagatgtgaggcgggaaagacagagaattcttgatggtggaggccagaatgacatcttagaaatcaaggagttgacgaagatatatagaaggaagcggaagcctgctgttgacaggatttgcgtgggcattcctcctggtgagtgctttgggctcctgggagttaatggggctggaaaatcatcaactttcaagatgttaacaggagataccactgttaccagaggagatgctttccttaacaaaaatagtatcttatcaaacatccatgaagtacatcagaacatgggctactgccctcagtttgatgccatcacagagctgttgactgggagagaacacgtggagttctttgcccttttgagaggagtcccagagaaagaagttggcaaggttggtgagtgggcgattcggaaactgggcctcgtgaagtatggagaaaaatatgctggtaactatagtggaggcaacaaacgcaagctctctacagccatggctttgatcggcgggcctcctgtggtgtttctggatgaacccaccacaggcatggatcccaaagcccggcggttcttgtggaattgtgccctaagtgttgtcaaggaggggagatcagtagtgcttacatctcatagtatggaagaatgtgaagctctttgcactaggatggcaatcatggtcaatggaaggttcaggtgccttggcagtgtccagcatctaaaaaataggtttggagatggttatacaatagttgtacgaatagcagggtccaacccggacctgaagcctgtccaggatttctttggacttgcatttcctggaagtgttctaaaagagaaacaccggaacatgctacaataccagcttccatcttcattatcttctctggccaggatattcagcatcctctcccagagcaaaaagcgactccacatagaagactactctgtttctcagacaacacttgaccaagtatttgtgaactttgccaaggaccaaagtgatgatgaccacttaaaagacctctcattacacaaaaaccagacagtagtggacgttgcagttctcacatcttttctacaggatgagaaagtgaaagaaagctatgtatgaagaatcctgttcatacggggtggctgaaagtaaagaggaactagactttcctttgcaccatgtgaagtgttgtggagaaaagagccagaagttgatgtgggaagaagtaaactggatactgtactgatactattcaatgcaatgcaattcaatgcaatgaaaacaaaattccattacaggggcagtgcctttgtagcctatgtcttgtatggctctcaagtgaaagacttgaatttagttttttacctatacctatgtgaaactctattatggaacccaatggacatatgggtttgaactcacacttttttttttttttttgttcctgtgtattctcattggggttgcaacaataattcatcaagtaatcatggccagcgattattgatcaaaatcaaaaggtaatgcacatcctcattcactaagccatgccatgcccaggagactggtttcccggtgacacatccattgctggcaatgagtgtgccagagttattagtgccaagtttttcagaaagtttgaagcaccatggtgtgtcatgctcacttttgtgaaagctgctctgctcagagtctatcaacattgaatatcagttgacagaatggtgccatgcgtggctaacatcctgctttgattccctctgataagctgttctggtggcagtaacatgcaacaaaaatgtgggtgtctccaggcacgggaaacttggttccattgttatattgtcctatgcttcgagccatgggtctacagggtcatccttatgagactcttaaatatacttagatcctggtaagaggcaaagaatcaacagccaaactgctggggctgcaagctgctgaagccagggcatgggattaaagagattgtgcgttcaaacctagggaagcctgtgcccatttgtcctgactgtctgctaacatggtacactgcatctcaagatgtttatctgacacaagtgtattatttctggctttttgaattaatctagaaaatgaaaagatggagttgtattttgacaaaaatgtttgtactttttaatgttatttggaattttaagttctatcagtgacttctgaatccttagaatggcctctttgtagaaccctgtggtatagaggagtatggccactgccccactatttttattttcttatgtaagtttgcatatcagtcatgactagtgcctagaaagcaatgtgatggtcaggatctcatgacattatatttgagtttctttcagatcatttaggatactcttaatctcacttcatcaatcaaatattttttgagtgtatgctgtagctgaaagagtatgtacgtacgtataagactagagagatattaagtctcagtacacttcctgtgccatgttattcagctcactggtttacaaatataggttgtcttgtggttgtaggagcccactgtaacaatactgggcagcctttttttttttttttttaattgcaacaatgcaaaagccaagaaagtataagggtcacaagtctaaacaatgaattcttcaacagggaaaacagctagcttgaaaacttgctgaaaaacacaacttgtgtttatggcatttagtaccttcaaataattggctttgcagatattggataccccattaaatctgacagtctcaaatttttcatctcttcaatcactagtcaagaaaaatataaaaacaacaaatacttccatatggagcatttttcagagttttctaacccagtcttatttttctagtcagtaaacatttgtaaaaatactgtttcactaatacttactgttaactgtcttgagagaaaagaaaaatatgagagaactattgtttggggaagttcaagtgatctttcaatatcattactaacttcttccactttttccagaatttgaatattaacgctaaaggtgtaagacttcagatttcaaattaatctttctatattttttaaatttacagaatattatataacccactgctgaaaaagaaaaaaatgattgttttagaagttaaagtcaatattgattttaaatataagtaatgaaggcatatttccaataactagtgatatggcatcgttgcattttacagtatcttcaaaaatacagaatttatagaataatttctcctcatttaatatttttcaaaatcaaagttatggtttcctcattttactaaaatcgtattctaattcttcattatagtaaatctatgagcaactccttacttcggttcctctgatttcaaggccatattttaaaaaatcaaaaggcactgtgaactattttgaagaaaacacaacattttaatacagattgaaaggacctcttctgaagctagaaacaatctatagttatacatcttcattaatactgtgttaccttttaaaatagtaattttttacattttcctgtgtaaacctaattgtggtagaaatttttaccaactctatactcaatcaagcaaaatttctgtatattccctgtggaatgtacctatgtgagtttcagaaattctcaaaatacgtgttcaaaaatttctgcttttgcatctttgggacacctcagaaaacttattaacaactgtgaatatgagaaatacagaagaaaataataagccctctatacataaatgcccagcacaattcattgttaaaaaacaaccaaacctcacactactgtatttcattatctgtactgaaagcaaatgctttgtgactattaaatgttgcacatcattcattcactgtatagtaatcattgactaaagccatttgtctgtgttttcttcttgtggttgtatatatcaggtaaaatattttccaaagagccatgtgtcatgtaatactgaaccactttgatattgagacattaatttgtacccttgttattatctactagtaataatgtaatactgtagaaatattgctctaattcttttcaaaattgttgcatcccccttagaatgtttctatttccataaggatttaggtatgctattatcccttcttataccctaagatgaagctgtttttgtgctctttgttcatcattggccctcattccaagcactttacgctgtctgtaatgggatctatttttgcactggaatatctgagaattgcaaaactagacaaaagtttcacaacagatttctaagttaaatcattttcattaaaaggaaaaaagaaaaaaaattttgtatgtcaataactttatatgaagtattaaaatgcatatttctatgttgtaatataatgagtcacaaaataaagctgtgacagttctgttggtctacagaaa

SEQ ID NO: 214 - DNA, 3617 bp, HOMO SAPIENS
cagtctcctgaatatttacgcgttgctgaatctcctgtggacaaaccaccaataggccaggactgtcctgtggacagacggggtgagcctcttcttgtgtctggagattctgaaaagatttgatcaccaggagatttttcgggacattaccaaaccactcattttagtggctgcctccgggtgatgatggctgtgtgaacgactgccatggcccaccggaagcttgagagcgtggggagcggcatgttggaccatagggtgagaccaggtcctgtccctcacagccaggagcccgagagcgaggacatggagctgcccttggagggctatgtgcccgagggcctggagctggctgccctgcggccagagagccccgcgccagaggaacaggagtgccacaaccacagccccgatggggactccagctctgactacgtgaacaacacctctgaggaggaggactatgacgagggcctccctgaggaggaggagggcatcacctactacatccgctactgccctgaggacgacagctacctagagggcatggactgcaacggggaggagtacctggcccacagtgcacaccctgtggacactgatgagtgccaggaggcggtggaggagtggacggactcggcgggcccgcacccccacggccacgaggctgaaggcagccaggactacccagacggccaactgcccattccggaggatgagccctccgtccttgaggcccatgaccaggaagaagatggtcactactgtgccagcaaagagggctaccaggactactaccccgaggaggccaacgggaacaccggcgcctccccctaccgcctgaggcgtggggatggggacctggaggaccaggaggaggacattgaccagatcgtggcagagatcaagatgagtctgagcatgaccagcatcaccagcgccagtgaggccagccccgagcatgggcctgagccagggcctgaggactctgtagaggcctgcccacccatcaaggccagctgcagccccagcaggcacgaggcgaggcccaagtcgctgaacctccttcccgaggccaagcaccccggagacccccagagaggcttcaagcccaagaccaggaccccagaagagaggctgaagtggccccacgagcaggtttgcaatggtctggagcagccaaggaagcagcagcgctctgatctcaatggacctgttgacaataacaacattccagagacaaagaaggtggcatcatttccaagttttgtggctgttccagggccctgcgaaccagaagacctcatcgacgggatcatctttgctgccaattacctggggtccacccagctgctatcagaacggaacccttccaaaaacatcagaatgatgcaagcgcaggaggccgtcagccgggtcaagaattctgagggggatgcccagacgctgacggaagtggacctcttcatttccacccagaggatcaaggttttaaatgcagacacgcaggaaaccatgatggaccacgccttgcgtaccatctcctacatcgccgacattgggaacattgtagtgctgatggccagacgccgcatgccccggtcagcctctcaggactgcatcgagaccacgcccggggcccaggaaggcaagaagcagtataagatgatctgccatgtgttcgagtcggaggatgcccagctcatcgcccagtctatcggccaggccttcagcgtggcctaccaggagttcctgcgagccaatggcatcaaccccgaagacttgagccagaaggaatacagcgacatcatcaacacccaggagatgtacaacgacgacctcatccacttctcaaactcggagaactgcaaggagctgcagctggagaagcacaagggcgagatcctgggcgtggtggtggtggagtcgggctggggctccatcctgcccacggtgatcctggccaacatgatgaatggcggcccggctgcccgctcggggaagctgagcatcggggaccagatcatgtccatcaatggcaccagcctggtggggctgcccctcgccacctgccaaggcatcatcaagggcctgaagaaccagacacaggtgaagctcaacattgtcagctgtcccccggtcaccacggtccttatcaagcggccagacctcaagtaccagctgggcttcagcgtgcagaatggaattatctgcagcctcatgagagggggcattgctgagcgagggggcgtccgtgtgggccaccgcatcatcgagatcaacgggcagagcgtggtggccacagcccacgagaagatagtccaagctctgtccaactcggtcggagagatccacatgaagaccatgcccgccgccatgttcaggctcctcacgggtcaggagaccccgctgtacatctaggccaccccagcctggccacgcagccaggacaccgggcagggccgcccgggcccagaggagctgggagccgggccgcagacttgaccccgacgccacagcccagccacggacgctggctccccaaagggtgtgccctcaccacccacttgatttttttcattttgccaaaaaggggtatgtctttatcaaaggagagtcacagaacaaatgtttgtttgtaaagcgttccaagtattttgccacgttctggactgtcttctccctgcacaagccagggtgtgtctcggtagctgtgcgtggtgtggagtgtgtgtctttcctccctgaagctgtgcggagcgaactggcgcctccgagggacgcggctcccggggcagggcagccgtcacccctgcctcccgcccccttggctgggacgtctggggtcctgtggggcccccacaatggtcccaaacagctgcctctgccactgactgcagggacacgggcagcctggctcccaggacacgacttgtaatgaaagtttggggacatgtgattgattgattgattgtaaataaaggatgatggccacaacatgaaaactccatatttatttagatgctattattactgtttggacttttattttggcaggcttttttccagactctagggttttccaatgtgactaatgaccacacctgcctctcccgtcgtctcttctgggcaccctcccacccggctgcatacccgggcagggctcccacagagacaaggagggcacaggtgtctgccccctctttaaaatcgatctacacacatccacgcacatgcgaccccgaggaaacgaaacccactctagaaaacgcgaccttggccgcacctaaagcagccagccgtgagtgcagaccccttggccagcgtggcgcagtggccctgagcagtagtggcatgtgtgtagatcaagtcggatctagtccagctcggttcattagcgatccatgtaatctgacgtcatcttgtctcgaagtctctttttttggcccaggccttgaagaatacactgtgacttaagaagccttaccacgcagtaactaaagctttaggatgactgtattcgaggagtgccgtgtgttgcatgcagctacccgtaggaagacttcgcgcatatcactaataaacctgaagtcgtgatgaaaaaaaaaaaaaaaaaa

SEQ ID NO: 215 - DNA, 18221 bp, HOMO SAPIENS
gtgggaactttgaggctcagagacagagcagaagacagaacctggtcttctgattccctgtgttctgcttttttcattgttccactggacgctcatcagagggaagatctttttcctcaattgcattgcagttggctgaaccttgtgtcaaccatccattccaggagccagctatctgagattccaacaatgtctcacccatcttggctgccacccaaaagcactggtgagcccctcggccatgtgcctgcacggatggagaccacccattcctttgggaaccccagcatttcagtgtctacacaacagccacccaaaaagtttgccccggtagttgctccaaaacctaagtacaacccatacaaacaacctggaggtgagggtgattttcttccacccccacctccacctctagatgattccagtgcccttccatctatctctggaaactttcctcctccaccacctcttgatgaagaggctttcaaagtacaggggaatcccggaggcaagacacttgaggagaggcgctccagcctggacgctgagattgactccttgaccagcatcttggctgaccttgagtgcagctccccctataagcctcggcctccacagagctccactggttcaacagcctctcctccagtttcgaccccagtcacaggacacaagagaatggtcatcccgaaccaaccccctctaacagcaaccaagaagtctacattgaaaccacagcctgcaccccaggctggacccatccctgtggctccaatcggaacactcaaaccccagcctcagccagtcccagcctcctacaccacggcctccacttcttcaaggcctacctttaatgtgcaggtgaagtcagcccagcccagccctcattatatggctgccccttcatcaggacaaatttatggctcagggccccagggctataacactcagccagttcctgtctctgggcagtgtccacctccttcaacacggggaggcatggattatgcctacattccaccaccaggacttcagccggagcctgggtatgggtatgcccccaaccagggacgctattatgaaggctactatgcagcagggccaggctatgggggcagaaatgactctgaccctacctatggtcaacaaggtcacccaaatacctggaaacgggaaccagggtacactcctcctggagcagggaaccagaaccctcctgggatgtatccagtcactggtcccaagaagacctatatcacagatcctgtttcagccccctgtgcgccaccattgcagccaaagggtggccattcagggcaactggggccttcgtcagttgccccttcattccgcccagaggatgagcttgagcacctgaccaaaaagatgctgtatgacatggaaaatccacctgctgacgaatactttggccgctgtgctcgctgtggagaaaacgtagttggggaaggtacaggatgcactgccatggatcaggtcttccacgtggattgttttacctgcatcatctgcaacaacaagctccgagggcagccattctatgctgtggaaaagaaagcatactgcgagccctgctacattaatactctggagcagtgcaatgtgtgttccaagcccatcatggagcggattctccgagccaccgggaaggcctatcatcctcactgtttcacctgcgtgatgtgccaccgcagcctggatgggatcccattcactgtggatgctggcgggctcattcactgcattgaggacttccacaagaaatttgccccgcgatgttctgtgtgcaaggagcctattatgccagccccgggccaggaggagactgtccgtattgtggctttggatcgagatttccatgttcactgctaccgatgcgaggattgcggtggtctcctgtctgaaggagataaccaaggctgctaccccttggatgggcacatcctctgcaagacctgcaactctgcccgcatcagggtgttgaccgccaaggcgagcactgacctttagattcagtcacctgttcagccggcactgagaagaacgaacacaagaaaaagataagaaatactagagtaaaggccatcaaactacgcgatagtctctgttcttcatctgctattaaccttgccttagaaacacataaattatgagattttttttaaaagttgttaccaaatacacatttcacattgaatcatgtaggatcttgatgggcctttgttcccaaggacttccacatttttgcacagattatgctccatcccattcacttctgcattcctgtaacttttaatccctatgtttgtctcacttttcatctggttgaatggcttttcttagtgtggtatttgctgtcacatagtttttcctgggtgagtctgccaactcacaggtgcttttaggcttgaaatctccatcctatcatttccgttttgcctgtgactgtaaagagtagccattcttttcccatgtattgaagaggatattcttctcttgctttatactactcacgtccttggggagggaaatgcacaatttttttttgttaggctgtaaagaatttaagctgtaaattacataagttagaacaagcccaaatttaatttgcaaccatcagaattcagaatctatagtgaccagtgatcaaggctaattggaaaagagttatcggcccatagctaataagtagtgacagacaaccaagcttcaatatttttctaaagaaattacaggtgggatatgctagaaaaggcattttggggttatgtttaaaaaaacattattgtcccacaatattaccttaagatttttcttttccgcactacctgaacattgtaatacagacaaacttgatttcttctagaagataacattttcaatactgtcccacttctcatcttaaaaatattgtcatgtttattctaatatccaacacaactatcaaaattgcctttttctctagaggatgaaggctgtgaaaaaaccgttcaaattctcttctttttcttttttattaccaggtccattttgcctgacaattgcaaatcagagcatacaaaataaaactgtgcagttttgtttggtttactttcaaaagagtagaaagcttgaaaagattctgaaaccacagtttcattattctcataatccttctgcaactgaaattacatattgcaggagacattttcatatcatcaatgtgacatttacaccacactttcaaagacaatcactgaaacaaaaattgtctttatgagctaaaaatatgcagaatctctgcctagaatctttattcaaacttttattagccagtgaaacacttgcttgccaactgccaagccatacttattaagttcgaacatgtttcacttaaggagagacacctagcttagtcatggcaagttgccattttgtaaactaaggattttggactgagatttcttaaatctttcttcaaatctcccacaagtatatacttttaaattatggagtattttaagtctacaaaaaggtataaataataatataatgaattcctatatacctaatacccagtttaagacaccaaatataacaagtataattacatcctccaatgtaccgtttccttattccacagatatctttttcattattgtgaagtgatgttcagatttctagttttttttctagtttttaattttaacatcagaactgaaataaaaaattatggatacgtgttttgaattgcaaactattcctcaggaattccaattaaatttattttacttgaataggaatgatcataaaagtgattctttttttgtgactagaaattcttaagccgatggtcactatagctcatccttaatgtatggctcatttgcttttgtcactaaacggttttgtgttagaaccaccaaaattatagcttttaagagcttcctttgaccactgtctttttcttaccctagttctcttatctttgatcgtatatttctcataatgtgaaatatgatgagattcacttaggggcagcatgttagttttgggaggcaatgtcaactgtgtctctgaattcctgtcttccaaattgaagccagaccatgctgatgacctcaagtagcactgactatttgacaatagggctgataatgtaatcggcttgaattttgacttagtaactttttatgtaatactttcggagaaattctctttaggacaaagcagagagtccaatttattgagggatagattgtatctcttaaagtggtcatattattattaattttgccaaaagaagaagaatttattgaatatttatactataaaatgcagtaacattctacttgcttattacatttaaatccttgtgtaactgaatgtttacatgtcaagaggaaaagctgtaagaaaatgctgtcacagacccatccctgtggcatcgtcagcagaatactgcttgcttacaatctttattatgcattcttataacataacctcagagtatctttaccaaaggtttttaaagtaaatctctttttaagatagacttattcttttataataatgaatgtgcactcatacatatgtagaaacatttagatttagagttttttttttctttcacaaggtataataaggaaaggatcctacaatattttattctagggtttcttaaatatatgatttatattactgtcttttctattaatcatttgatttaaacaatgccaagtcactcttttttagttgcatgaaattttgcctgcaacagagagaaaaagattgtattactttaatgattataatcatactgtctgctgatataatatcataattgttgtggtttaaatacataaatagtagaaaaatcagagtctataacagaaagtttgtaaaaatatactgattttgaaaagtatcaggaatataaatatttggtaattctgtgtaacaagagagacatggaaaaggaaaaaaatccactatatcatgggctctgcagaacatatcaaaataggatttcttaaatttttcaacccccagaccatactgactcaacatggagtctcactggccaagaaaattgcctttaaaactcgaaaataaggccaggtgtggtgactcacacttgtaatcccagcaatttgggaggctgagacaggaggattgcctgaggccaggagtttgacaccagcctgggcaacatagtgagaccttgtctctacaaaaaataaaataaaataaaaaccaaattagccagacatggtggcatgcgcttgtttaaaaaaacaaataaataaataatcgactcaaaaataagtcatgtgtcccagcataaggcatcaggttgttagatgctggcatctctgcagctcaaagatgtgggttctttttcttgtcattaacacattgttatttctgtaggagcaacttctctgatcaaaattacttttctgggtatgtgctgattaagggggtggacttatcaacactataattgttccctatgaaagattccacagagatgtttatggtgaggtttaaaggatatgaaactctacatttaaacaagtattttatatttgggtacagaggaagaaagagagggctttttccatggggctatagtagagagttagtggaatatagacaggactctgaaaacacaacttccagccatttttttagttagtaaaaatcctattaatgtgaaccagccaggaataacagtgttatttctattggatatggtttgggcttctcttgtcaaatctgtgtcggctgccccctgatccttccattatcaagttttgaagggtgttggggaaattatggcagctgctagggagatcagggaaacactgatgtaacctcaaagcctctcaccattcctcttggcttggaaaggctttattttttcatatacatttctagaaatattgctattctaccttagtatttcacatttgtagttcaaacaagcgattgtccatctgttgcctagagctatagtacatgtgtgttatgaatgaaatatgacagcatgttccatacccctgctttagccatctgtgggaaaccagcaaactgaaaaagacacctctgcaaaatgtgcctcaagtccatttcttgggatcgctcgtttggtgcactctcgtgggagacaatcagagaacaacatatacttgtgccttattttcaaagaatctatttacactactatgaatattccactgaagagtcaatgatgtaaatgataaccaccaaatctcaaaaatatactcaccaaaaagtaaaaaagtaaaaaaaaaaaaaaaagaaagaaagaaaagaaagagagagaagtcaacttttcatcttaatatattctagtagtatttattttttccttgtcttggaagtatctcataggtctttaaatgagtaaaacatttttatgccagaaggtgatataatggatgttagtgttttttatttgattttacagtagttttagtcagataatgaggacagagacttcaacttgattctttaccaccattcagcatattttttaattgtcttcattgtatttgcttaatagtggtccagacaagttcaaaacttgttctcagtgaggcattaatatggtgcaaccatgaatatttcaggccaagttattcacttgacagataactagaatgaaacttttctcatgaggctgttgtttggttagcatagccttatttcaaaccttaaaaagttacctgactgaagctactatgacttggtaaggattcttcctctcttgctttcttcctcccttcctttcttcctcttccttcctcctcttcttattttctttcctactttccatcctacctattagtgttgctgtacttggattttttgtaaattaaatcaatgcattatgattttagggaattatgattatattcataaggggaaggctaccagaaaatatatgtggcatccataaaatcttcttttataggggcatattttttaggttgtatttattcgtaaagtgaaatgagataatagagtctttctgtttcatgttaatgaattttcatcagggactgaggtcatagattcttggaaaattcatttgtgactgatctagttttctcagctgtatgcaaagtaatctttcaaagactaggttaagattttttttttaagtctgaagcaatgtaaccccaaaaaattataattttaatgatggcattttattttattccattgcagcttgataactttccttatagcaaaggaataactattgtattttcagaattttaacacagattaacacttagcctgtaagactaataatatattgtaatagttgatactaaaatatttttcagcaggttggacagcaccagtttttcttagatcacagactacaggcagaatttcccttcaatccagaaaaaaggacactaatttccttttctatttaattttcctggcccttgtgcaaaaaattgtggactctatcttagttacaacatgcatgtcccttattttgtggagagctgtgtgaaagatgcgttttttttctttttttcttttttttttttttgagacggagtctggctctgtcacccaggctggagtgcaatggcacgatctcctctcactgcaagctccgcctcccaggttcacgccattctcctgtctcagcctcccgagtagctgggactacaggcgcctgccaccacgcccggctaatttttttgtatttttagtagagatggagtttcacagtgttagccaggatggcctcgatctcctgacctcgtgatccacccgcctcggcctcccaaagtgctgggattacaggcgtgagccaccgtgccccgcgtgtttttttctttagctgattgacaggtccccttcaaagttacaaaaaaaagtgctaatttttgctgttaaattctggttgttatttaattgacagaagtctcttgatgcacgaataaatatctctacatctagcctttgttaaaaataaaaattaatattctacaaacacctacatatactagagaggggtgaaacactgcagctaattcctttataatactttcagatgattgcattaagcctttcatgttatgtggcattgttaatttttcctagatacccatccacttaagggccagagaaatccttattcatttaactctggtgggcatttatgtaacatacccaaataaaaacgttattaaacagccacaatcgcattcagtcaacttggcactgaatgtagcttctaaaatcagttctctaccctacgaatggaatgttctaccaagaaagagaagcatcaccatgtcatcttgtgttctacaccactatagagagttacagttgcccccaaacacgaatgctattcccaaataaaatagaatcatgctttgggaggccaaggcgggccgatcacgaggtcaggagatcgagaccatcctggctaacacggtgaaaccccgtctctactaaaaaaaaaaaaaaatacaaaaaattagcctggctcagtggcgggcgcctgtagtcccagctactcaggaggctgaggcaggagaatggcgtgaacccgggaagcggagctttcagtgagccgagatagcgccactgcagtccggcctgggcgaaagagcgagactccgtctcaaaaaaaaaaaaaaaaaaataggatcatggcccttttaaagatctgaatcttctctgttattttcctgatgaatcaccatcccatatcttcttagtcctggccagtatgtagttgcgctcacatacgtctattctagctctgtagctccacaaaacaagtcttaagtccaaatctttgcctcttcatgtctgatatcaccaactcattcagcttttcttcacttattgacatagtgtcatgtcctatcactctctgctgcttctttaaacagtggacacaaacatattttctaattttcagtgtactcagtgaaacttggcagttcaccatgagtcaggctaggttgaaaggctttctttagggttgaaagtaaacgaaattggaatcacccaaagagaatttccccaaaaaacctcagacccagaagtgtaaaagctacagaaggatagaactcccatgtctacagacagttctgttactttttgttctgtactattttggatgttgccaaaatcaaattcatcctgaaaacaggaagcaagctaatgcatatgccatccatgagattcccacttctgggtcagttcatattccattcaaccttttccttttatccttgtcttcttcagaataagacatttttcctccatattttcatattaaatattaacactttataggttctactttaatatatggacactttacaggttatacataaatatttgctggttgattgatttcgagattcattcattctgtgctcaaatatttgtacctagagacgttacatgttagaaaaagtgagcagcttctttctctaatcatttaggagtccatatttttcttttctttttgttctcccaacatccttatctcttactcagctcttcaatttataattaccaaataatcactgttagagaatcagcccctaagtaactttgattctggccaactgtaataagatccaaccacttaaatctgtacttactcaataggaaggaatgtgacatcaggaagagtcattccagtgacattagtaagactttatggagtacataaaatttgataagaaatcttgagctgattctttgacttgatttagaagttgagaaaagagtatttaaggcacaacagggaaacatgggctatactcagagaagaccctctgcattggccaaaatatcatggattctggaaattccttcttaacagaaaaaaaaggcttccaaataatcaggctgaatgggaagaaaaaggcatagaggaagcctgaggaagtatttacttgcttttcccatctctttataattggaagagaagatgatctgccaaaatataacccagcatgcacagtatggacaggaagcagccctccatgaactttattatcacagaatatgagcattcttattgatccacagctacatcttctattcttgcagcaagggtacatgtcctttgaccctccacaaaagaacaagcaggacatctctattttcctattgagtctgagtccattattagaaaggacttcccagccatcttttctacttggtattaaaattcccttacagattcattgctaagtgccaattctttttttttcttttgagacggagtcttgctctgtcgcccaggctggagtgcagtggcgcaatctcggctcactgcaagctccgcttctcgggttcacgccattctcctgcctcagcctcccgagtagctgggactacagacgcccgccaccgcgcccagctaattttttttgtacttttagtagagacggggtttcaccgtggtctcgatctcctgacctcgtgatccgcccgcctcggcctcccaaagtgccaattctgactctacttaaacatcacctgtatcagggagctcattattccttgaggtcttacatttctttcagcacattttgttccaagctacacgactttaaaacagagccagcctttggggcatatgttctctttggtgccacacaaaacctgtagtacatgatacagtgttgcttcccccctccttttccttccatatatatttgttttgttttgggcattgcattacttttttgaatttttaagaatctctaaaattagtctgaaggatgttctgagggccagacattagaatttgtgagtttttttgttgctggttgtactttcctatttagaagacagaccgttctgacagttgttgtgtagcttcatgccttccccagtaactaacccatgaacagtacaccccttttatctgacttgttgataatgaccttaaaaatgttaggaaatgggccgggcgcggtggctcgtgcctgtaatccagcactttgggaggccgaggcgagcggatcatgaggtcaagagatcgagaccatcctggtcaacatggtgaaaccccgactctactaaaaaaaatacaaaaattagccgggcgtgttggcgggcgcctgtagtcccaactacttgggaggctgaggcaggagaatcacctgaacccaggaggcagaggttgcagtgagcagagattgcgccactgcactccagcctgggcgacagaacgagactccgtctcaaaaaaaaaaaaaaaaaaaaaaggttgggaaatattggtgtataatccccatgtctaacaaggaagaagtcaaaagcaaaagatagtggtattgccgaaaactcattatttctagttagttcatctgtggaaaaggatatcgttcttgaggagaggggttctattatgctatagttttctatggaaatgtacaaatgctttcctcattgctctggatgactatttagtttaaataatatacctttgtcatggggaagaccatgattgtggcttcttctaccccaactttgaatgagagagcactgtaagcagaaactgccatcagtctcctgggcaggacctggaggtaactttctgagctgtaaaatagtaattcctaagagagcttacaaactgcttccacacagaaaatagcgcagggaggacagttattagtacccctattctagaagagaaagctgaggctcaagccattaagtgacttgccaaaagctgtgacatagctgggaagtggcagatttggggatataaccaggtcttgcaagtccagtgctgtctccaaagtagccacgctcacagctgagaacaccttagaggacaatatcgacttcttacagactaccaagcccccagtcatccagggaaattcagagaccaattgactgccaggtggcaaatccacatgtgtactgcggtctttagagatcatttagagcttgcacacatctgtgtcttcttgtgggaaacctctaggtattctgtctgatcagcactgtgaggaagttggtgggaaaaggccactgataagaacaaacaatgggcagaaggaagcacattgcaataaatttccccagagagagttcctttacattccattcaccaaaaacctctctggaactgtcaggttcagaatatcaaccaagaccatatcatttagaattcattggcatgtagaggtgactcgattcctaaaagaagcctctctcccatgaaccacgatgtacgttccacagaggcagaaaccgccgtaggttagcaatgcattttagtctttctctccattcacatttactgagagcacaccacgtgcatgttgctgcaacaggcatttccgatagagccgatccatgagctaacaatgtctgaaaacaaatgttatggaactgttggcatttctgagatttggcctttgccatttgatagactttgcttcccaggatgctgtcattttgtgattttttataattacaaggaatttggtaccatgttgttttcaaaaaacctcctagaaagtctccatgtatgctctagaagttgctctacgtaacagttcagcaagcaagtgttccttctcttgagctgcgtccctcaggaagctgtacctttagggtgtgctttccactttttatttcctctcatttcactcctttcattgtttgctatatcctaaaatatgtgaagtgagagaaaaaatatcatttcttctcattaaatctcctgcattaaatctaagaatcctttaaaataatcacacctgataagtgttttatgcatttccctccctggagtgttatcatccatcaagccagtatcatcatccacctgcttattccttgggactaatgagagccaagttaaatagcaaatgacttctcaccccttcctagtcctcatgcctgaggaataagggcgacattaatgggagcgggagagtggtggctttggttgagatgcacgttcacagactagaaaagtgcctcacctccatggtgtatatgtgccaccttttcttaatccagtctatcattgttggacatttgggttggttccaagtctttgctattgtgaatagtgccgcaataaacataagtgtgcatgtgtctttatagcagcatgatttataatcctttgggtatatacccagtaatgggatggctgggtcaaatggtatttctagttctagatccctgaggaatctccacactgacttccacaatggttgaactagttcacagtcccaccaacagtgtaaaagtgttcttatttctccacatcctctccagcacctgttgtttcctgactttttaatgattgccattctaactggtgtgagatggtatctcatagtggttttgatttgcatttctctgatggccagtgatggtgagcattttttcatgtgtttcttggctgcataaatgtcttcttttgagaagtgtctgttcaatactatgcagccataaaaaatgatgagttcatgtcctttgtagggacatggatgaaattggaaatcatcattctcagtaaactatctcaaggacaaaaaaccaaacaccacatgttctcactcacaggtgggaattgaacaatgagaacacatggacacaggaaggggaacatcacactctggggactgttgtggggtggagggaggagggagggatagcattaggagatatacctaatgctaaatgacgagttaatgggtgcagcacaccagcatggcacatgtatacatatgtaactaacctgcacattgtgcacatgtaccctaaaacttaaagtataataataatgaaataaaattaaaaaaaaaaaagaaaagtgcctcacctccctgtgaggcttgatgaatattgtggccagtgagtggaaaatgattcttgtcgaatagacagagtattcccaccccaggaatggattaatagaagacacaatttgagcacttctcagaattatctagtatgcctgagtagagactcacatgggtggaatctgtgttgtctcatcagagggaataaaaagacaatgaggtggtaaatgtgaaaaaagcagccttttagaaaaacattattttcaaatacctttataaatcatctaatttatcttcacataatataaagaaaaaactaataaaaattttcgtatttcactttacataatatgttctcccatatttagggatcatacaattgtattgtcttcaaaacacacacacacacacatacacacacacacacacacacacacacaccccttccaagaaagctgatccttcagaaaataaatcttatttttaagcacttgggttttcaggccagaaaattaataaatcctaaacctgacccatttttgtaacagctaaaaaggagaagaaaaagctagttaaattttgtgtggatccatttatctcttaaaatatgccaaagcaatttgaggtgggggtggaaacaggtatttatctctcatgcgtgattctctctttatatttctatctgttgggaaaagggtaaagaactattcttggtcattattgatgtattgtgttgccactttgtatggtgcctgctgtgctttatcccgaggcatagcagtaatcgttactatcttgactctttccttcatcacaagagagtaaatatgaagtctgaatgtcgttcctcacccccaaattgtttaactctgcttccaaactagtttaagaaatgcaaaatgggaagagctagcttttcttagatacatttcttccttttttattctttcttgggagacgttaagtataaaagggaaaaagtcagttccttcttctctctctttctctttgggtgacagcaatgctcacttagtaattataaactggaaataggagagtagcttgagcaggttatgatatatctgcccaatgtgtttcattccttcaaacataaactttgagagtaaaagagatttttataatttaaatgccaacgacaggaatggcctcatgttttaactttcaaataataaatggggagttggtatttgggcagagtttgcattttactaatcctatatactttgagcttagtttttagaattgtgtcaaatacatcaacatatcaggattatagtgccaaaaatagttaaagtgccttggtcctccctctgtaggcagcaaattgaaactaacatgggaccatgccatccttctagcataatggagaagtctgaactgaggagtatctttgatgaaagacatttaggaccctagaaactaaatcttgtcaccaagactttatagtaaagtagtagcaaaattatttttaaaagactttcttccttttactacccatttcctctcttgggaaagctgatgagcaaattatccaagactcatttctttattaggcaaagtcagaatatttcccctctgaaaatctgaattatgccctcattctttttcaagaaatatctcaaagagcaaatagaattaaacatgacacttgattgtctgattatttggcatgtataaaattatcatgtggcttaatgtgccttaagtgaaaatttaaacttagacctgaaacctttacagttggatgtagcgttgagcttttgcatgttttctgtataataaaccacttttgttttgtttgttttgtcttttaacctacacctttatcattactctaacagatttagggcttctctttctctacagctaagtaagggaatatgtgcaattatgagacatacaaaaaaggaaagggaaaggactttctaagtagcaaatctgtgccatgaagtagatgtggcgtgaagatacagagcctgaggatagtaattttccctgagccacgcacacaggcttttatttcatgccttttctctttctgtgccgtcacctttgagaaaaacgattgcaccttctccaagtctgcctttttaacagctacagttaagttggcaagacttccccagctctgaatatagccatttgccgactccggcctctttgcgagactgactcaaatctgtgatcttctgttcagcatacacatcagcaaagtgagaagatgagcactaaatataggctctattaactttacttttagatttactgccttcaaaaagtgcctattctgagcaacataaacgttattccttacatatgtatgtacacacggtacccagagtcgtactgtgcagccttcaaaaacataccatcagaaagagtaggtgctgagataaggaaactttgccaaatgaaagaaagtcactcacttccaatatcccctctcaagcggctaccgtgaaacgggctgcaaacacattccctgagcatcccttgctgatacagcttctttatatttatatcctactggatggtagcatattgctaaggtttcctgtactctgcttcaagggaatgtaagctttatggcattgaaacatttagggaaaaaaaagatgtttaagagaattaatagagccgtagtctgtattaggatgtgtgtcatatgtgtgttctataaactaagcatcggtgggtttagagtgttaaagtgtcagcacattccttctccttttgtctctcaggctaacatgagagaaaatagaaaagtcttggctgtggggattggaagctcagggggccaaatgtccttgccagatccttagagcattactttgactcctaaaaatagtagtgtatgttatttgatggcttttgtttccatagttccatcactgacaaaactgtcaatactgttgatggagcagcagcatagcctagagtgatgcattcttacccagaggtggcaataggagagggtccatgtaaataggacgaggtagacagtgcatgattgtaggagaagggttgaagggaggacatgattccaaaaaagatcgttctcaatgtgtcgtctgactcaaccagctggcagattacacttgccaagtcgttccctttccttctaagtcagttggctccatattcacttgaatatgcctctgtttgggcaaagcaagatacctccacttaacctttatccaaggaagctcttggtgtcctcttggtcataaagttgtctcctacctaacccagttttaccaaatggaagtaaaaggggacaaactatggaagatggactccatgccattgcagtcagccaccattctcttttccatataaggagccccattacataagctacgggtgaggttggaacagctatgtttcataatttcaagagtgtgaccaccctgctctagtcatcatcattggatgaatccagttgactctttggcaaaagggtgatacttttcactaaaaatgcctactcttcctgttgatgttccttttctgtttttaccttgtccaatttccacactagtcattttttttattttttagaggatcagattttagcgctggaaaatgagttcaaaaatttcagtgtaatgtcataaggatgttgggatacagagattttttttttccttggaaacaaatggactgggaagaaacacagcatggctttgctctgagtttcaatctgatgattatgaccatggaagatagtcttatgtaaaggttaaatggtgtttacaagtggatagataaggcggagatggtgagaagccgggttttctctatgctaaatgtgtctactaagagcagcacttcctactagctaagcacaatcatagccccaccgtgatgagctgctagtctgaataacattccctgacttagggaaaggcacacaaaaacatataaagaatatgtctattttcatatgtgtgatactgacagagccatggtattcctaaaatataggtttctcttttttcttgtattcttagcaaattgcatttattcactacattacaaaccatcactgatgtatccaaaatagcacacatagttcagtatgaaaataagagaataaaatctgttataagcaagtgatttaggtattttcttttgtgtttatgcattatctgactatattaaaacctgtttttctatttaccttctatcagttttctctaccaattatgttttttcaatgctctataagaatgaatatggaaattatatttcttttttctgtaaaagagttgcaactactttattatatttagaaatccaataaacttcttattacattta

SEQ ID NO: 216 - DNA, 1520 bp, HOMO SAPIENS
ggctgctgctccggcgcggagcccagagccggttcggcgcgtcgactgcccagagtccgcggccggggcgcgggaggagccaagccgccatggcctaccacagcttcctggtggagcccatcagctgccacgcctggaacaaggaccgcacccagattgccatctgccccaacaaccatgaggtgcatatctatgaaaagagcggtgccaaatggaccaaggtgcacgagctcaaggagcacaacgggcaggtgacaggcatcgactgggcccccgagagtaaccgtattgtgacctgcggcacagaccgcaacgcctacgtgtggacgctgaagggccgcacatggaagcccacgctggtcatcctgcggatcaaccgggctgcccgctgcgtgcgctgggcccccaacgagaacaagtttgctgtgggcagcggctctcgtgtgatctccatctgttatttcgagcaggagaatgactggtgggtttgcaagcacatcaagaagcccatccgctccaccgtcctcagcctggactggcaccccaacaatgtgctgctggctgccggctcctgtgacttcaagtgtcggatcttttcagcctacatcaaggaggtggaggaacggccggcacccaccccgtggggctccaagatgccctttggggaactgatgttcgaatccagcagtagctgcggctgggtacatggcgtctgtttctcagccagcgggagccgcgtggcctgggtaagccacgacagcaccgtctgcctggctgatgccgacaagaagatggccgtcgcgactctggcctctgaaacactaccactgctggcgctgaccttcatcacagacaacagcctggtggcagcgggccacgactgcttcccggtgctgttcacctatgacgccgccgcggggatgctgagcttcggcgggcggctggacgttcctaagcagagctcgcagcgtggcttgacggcccgcgagcgcttccagaacctggacaagaaggcgagctccgagggtggcacggctgcgggcgcgggcctagactcgctgcacaagaacagcgtcagccagatctcggtgctcagcggcggcaaggccaagtgctcgcagttctgcaccactggcatggatggcggcatgagtatctgggatgtgaagagcttggagtcagccttgaaggacctcaagatcaaatgacctgtgaggaatatgttgccttcatcctagctgctggggaagcggggagaggggtcagggaggctaatggttgctttgctgaatgtttctggggtaccaatacgagttcccataggggctgctccctcaaaaagggaggggacagatggggagcttttcttacctattcaaggaatacgtgcctttttcttaaatgctttcatttattgaaaaaaaaaaaaaatgcccccaaagcactatgctggtcatgaactgcttcaaaatgtggaggtaataaaatgcaactgtgtaaaaaaaaaaaaaaaaaaaaaa

SEQ ID NO: 217 - DNA, 2043 bp, HOMO SAPIENS
tctgtcttttcctccttccagtgcccggcgttcctcccttccccctcgccgccgaccgagttcttccttttcagaccgggtcgccttgctgtcgtcgcggtgattttcctgctactgctactgctgctgctgccaccgccactaccactgggctcatttgccccgaccccttcccgccgccccgcccccagccccacacaagatgtcagaggatttagcaaagcagctggcaagctacaaagctcagctccagcaagttgaagctgcattatctggaaatggagaaaatgaagatttgctaaaattgaagaaagatttacaagaagttatagaactaaccaaagaccttctgtcaactcaaccttctgagacgcttgcaagttcagacagttttgcttctactcaacctactcattcatggaaagtaggagacaagtgtatggcagtctggagtgaagatggacagtgttatgaagcggagattgaggagatagatgaagaaaatggcaccgctgcaatcacctttgctggttatggcaatgctgaagtgactccactgttgaacctcaagcctgtagaagaaggaaggaaggcaaaggaggacagtggcaacaaacccatgtcaaaaaaagaaatgattgcccagcagcgtgaatataaaaagaagaaagctttgaaaaaagctcagagaataaaagaacttgagcaggaaagagaggaccagaaagtgaaatggcaacaattcaacaacagagcctattctaaaaacaaaaaaggccaggtaaagaggagtatttttgcttcacctgagagtgtgactggtaaagttggagtaggaacctgtggaattgctgataaacctatgacacaatatcaagatacctctaaatacaatgtcaggcatttgatgcctcaataatcagaaaaactgttggatttcatctctgcagggctttacatttacctttttatccttatatttttctaaaggtaaattatttgttagatgagtaagcaagataccattgtcgtcattggttggcttcagtagaatgaaacgtgaagaaattgcatttgataactgctattcatttaacttttctcattatcagtaccacggttccctcaaagtttgttgaataaagcaacttttgtagatgctgtttcatacagcacttagatgaattattgatcttcctaatatcaggcgcctacttaacctatggtgtgtactttttgtaagttgtaacttgaaattttcagatgctttgaacttgacacatactctagcaattcattggaacaccaaggcaaaaacaccaacctgctaaaagagatcttttcatttttcttattttcagctttaaaacttagctgtcgttcagttaagcttaaagataggttaatttgtaaatggcaaagtttgttttgaggtttttcctcaataacttgtttcccaggcctattaggccatctctaaaattgatctagctgttttatttttatgtactcttagttttatgtaagaaaccttaggatgagctcccttttctaaggtgtttttgttttttgtatgtttgcttttttcctgttttttgttttttccatttacggcagtggtaccatgttttggatgtgtgatgtttatatgggagaacaaaaagctgatgtatagccctgtatacagtgtagatactatttttgtaaaaacacaaggctaaattaatgaacaagaatactgaatatttcatcattaaaaatttcttgtatttcttgtgcattaatctgacgataatttccctgtatattatgttcatttagctgtttgtaatttttgttaattagatcaggttgtctgcatttgttggtgtaagtgaacatcatcacagttatcctgagttgagtttaagccaaatacatgcatagaaaagggtcttcctattaatggaagaaggtaatttttaggatgtgtattatttcagttttgtatgtttaacttttattaaataaagtgtttttaaaatctccaaaaaaaaaaaaaaa

SEQ ID NO: 218 - DNA, 7150 bp, HOMO SAPIENS
atgacgataaaggcacggcctccaacgagacctgtgggcacggccatgttgggggcggggcttccggtcacccgcgccggtggtttccgccctgtaggcccgcctctccagcaacctgacacctgcgccgcgccccttcactgcgttccccgcccctgcagcggccacagtggtgcggccggcggccgagcgttctgagtcacccgggactggaggtaggaacccagccatggtgaacgaagccagaggaaacagcagcctcaacccctgcttggagggcagtgccagcagtggcagtgagagctccaaagatagttcgagatgttccaccccgggcctggaccccgagcggcatgagagactccgggagaagatgaggcggcgattggaatctggtgacaagtggttctccctggaattcttccctcctcgaactgctgagggagctgtcaatctcatctcaaggtttgaccggatggcagcaggtggccccctctacatagacgtgacctggcacccagcaggtgaccctggctcagacaaggagacctcctccatgatgatcgccagcaccgccgtgaactactgtggcctggagaccatcctgcacatgacctgctgccgtcagcgcctggaggagatcacgggccatctgcacaaagctaagcagctgggcctgaagaacatcatggcgctgcggggagacccaataggtgaccagtgggaagaggaggagggaggcttcaactacgcagtggacctggtgaagcacatccgaagtgagtttggtgactactttgacatctgtgtggcaggttaccccaaaggccaccccgaagcagggagctttgaggctgacctgaagcacttgaaggagaaggtgtctgcgggagccgatttcatcatcacgcagcttttctttgaggctgacacattcttccgctttgtgaaggcatgcaccgacatgggcatcacttgccccatcgtccccgggatctttcccatccagggctaccactcccttcggcagcttgtgaagctgtccaagctggaggtgccacaggagatcaaggacgtgattgagccaatcaaagacaacgatgctgccatccgcaactatggcatcgagctggccgtgagcctgtgccaggagcttctggccagtggcttggtgccaggcctccacttctacaccctcaaccgcgagatggctaccacagaggtgctgaagcgcctggggatgtggactgaggaccccaggcgtcccctaccctgggctctcagcgcccaccccaagcgccgagaggaagatgtacgtcccatcttctgggcctccagaccaaagagttacatctaccgtacccaggagtgggacgagttccctaacggccgctggggcaattcctcttcccctgcctttggggagctgaaggactactacctcttctacctgaagagcaagtcccccaaggaggagctgctgaagatgtggggggaggagctgaccagtgaagaaagtgtctttgaagtcttcgttctttacctctcgggagaaccaaaccggaatggtcacaaagtgacttgcctgccctggaacgatgagcccctggcggctgagaccagcctgctgaaggaggagctgctgcgggtgaaccgccagggcatcctcaccatcaactcacagcccaacatcaacgggaagccgtcctccgaccccatcgtgggctggggccccagcgggggctatgtcttccagaaggcctacttagagtttttcacttcccgcgagacagcggaagcacttctgcaagtgctgaagaagtacgagctccgggttaattaccaccttgtcaatgtgaagggtgaaaacatcaccaatgcccctgaactgcagccgaatgctgtcacttggggcatcttccctgggcgagagatcatccagcccaccgtagtggatcccgtcagcttcatgttctggaaggacgaggcctttgccctgtggattgagcggtggggaaagctgtatgaggaggagtccccgtcccgcaccatcatccagtacatccacgacaactacttcctggtcaacctggtggacaatgacttcccactggacaactgcctctggcaggtggtggaagacacattggagcttctcaacaggcccacccagaatgcgagagaaacggaggctccatgaccctgcgtcctgacgccctgcgttggagccactcctgtcccgccttcctcctccacagtgctgcttctcttgggaactccactctccttcgtgtctctcccaccccggcctccactcccccacctgacaatggcagctagactggagtgaggcttccaggctcttcctggacctgagtcggccccacatgggaacctagtactctctgctctagccaggagtctgtgctcttttggtggggagcacttgcgtcctgcagaggaccacagtgggtggcacctcctgagaaggcgaggagagtggttgttgccaactaagccctcgaaccaaggcagcctccagagccagcctgggactcccagtgaacttacacttggagcccgtgcagtacaggcaaaacacgcaagggcatcaggcactggtggcatcgtagaagagatgtggcaaagtgctgtacccttccacctcctagaggtgggcagctgggccccacctacttgtgactgaaggggcacaccactgccctgcctgcccacttagccgtccatggcaccagccccctggatgggcattgggctgacacctaccatgctgctttttggcacagttgtctattctgagccttgagagaaaaagtgccccttaagggttgaaggcagtctgaacccttgtgcttggtggggctcgtggccttccccttttgcctggctgtggaggcctgatgctgccccgttccctgtcagaggctaagatgagatttgccagcacaggggccccagatctgcctgggcctgtgcagcagcccagcttcctggtgtatttttcaggtaggcccttgtcctgccagctgccttcctcatcccctcgtcctgtcccagaggttatctgcctggcctggctccccacgagtcacctgcaagccccagggcctgggggcagtgactggcaggtgcagatgggctgtttcgtgtagtggaagagcagcctgatggccaagggggtggacgcaattgtgggatgtcctctttactcccttcctggcctcactggctggggcagaggggcagccgctaggagagactgaaagcagcagctaggactgaggagtgggttttattgtccttcagagctcttcaagctgtcccctctgtcatcactccctggatgtgtggggcatggttccttccctgggaaggctaagttcagttctgttttttattctatgagaacaagtcacagctgcagctgggccccatgctctgccccaagcccccaaccccgcggtgctctggcggcttcctgtccactctcggggcccttggggcctggcttgctccagggtcttgggctactggcagctcctctccttgggctcctggctgccaggcgttggtgccacttcttaaaggcctggaaccagggaggagaggaaatgctattgttgtgggctttctccggggtctgtgctgtgcctgctagagcaacccctgtacccagctccttttgtccccagggcccctccctctgccccaagcagccagccagtcttgcctaggccaaatgcacaagctcagaatagatctgatggtgagctgggaagctgtactcagagcagagcaaatgagggagggggcgctcaggacccaggccctccatgggctagtgtgagtggcagccatgcctcatgccacaccttcttcgcaaactgatggaccgggtgggcctggcctgagctggggccacaaatcaaagcaagggctccagcatccagcctgtgtgttctgtaatggaactgaccccctcccctgaaaacgaaggggccccggggctggcaagcagggaaagctccacggtgcgtggctgtggcacagacttctggaaggctggctgagtggaatgcagggaagagggcagtacctgggaaaggacccacccatcttcctgctgctgtaactgctgagccactcgcagtcgcaggatccgctgccaccacgtctgccaggcccatctcaggtgccactccctgagctttggggacagttggcagagaaggcctcttgtgctcacgctcccccgcagtccccagcccttctgcctttctcccccgacactgctgcaccagagtgaaagggctatggcaagggggtgtcatctgaggagtattaagaatgcagattcctgggcctgtcccccaaggttttggagtcagtaggtccaagggccatacttttgagaggggtttgggttaagtatgaggtgaaatgggagatggtcagtgtggagaggggtgcacccactcaccagggtccgcaccagctgctctgccccttgggcatccacccagtgctgccatgccactgccaggcacctggcctgctgggaaccccgcagcccgtgaagcagtgcctcgaggcaccggcgctgcaggtacttcctcctgatggccaagagcatcgtgacccttcagggccagaaggagggcagagccatgggcctgggcctgcttttccaggatcctgcaggaacgagcactggccagagagggcccagctgtagccatggctcaggcaagcccctcagcccttgcccccatccctcggacccaccaaactgcacacacagctcctcttaccgtagcctccgtttatgggccttgctttgggctttgcaggctctgggctcagggctggagtgcgctcttggtccctggtccctcgtccacaggggcaggcctgggacccagctactctgtccaggccactgtggccagagctggaaggcagggcagagggaatgttccctgcaccctggaaaggggagttgagtcacaagaggttaaggtgggtccaggaaggcagctgctcttagtgcccgcctaggagttgagtacagtgaggagggtggaggaaggtgctgagcttagccttgtgccctgcccccatctccccaggcctccagcctctcccggctgcctgccgcccaaagagaaatcacaggggcggggcaggaatgcaaagtgttttctcagaacagctgaaacattccgaagagggaatggatggggagaatggtcaatacacataagaccgtgtcccaaggagctgatttccaggcccctgaggactggagaccgcttcacccctgcacttcagacaccgtttgtcccccggggcaaggtctccttactctgagcccaggccgttccccttggcttcctccgtccacccaggctgcactgcagtgatggcgcgggaggcaccagctctgtggcctgtgtccagcagctgcgggtctgaaggaatagccagagaggagcacctgaaccccatgggcttggacttcctggggccccgctgggatttcttcgctgctctagctggcaggacacatcccggcctcttccacccattcccccatgtggctgaagacattccaacaatggggtgggcccataatagttagccctcagtcagttcccggagcacagccctgggagggggctatttctctccccactgaaaacatttcaaagctgagttacttgtctgaggcctcatccctcggaagccgtctgactccagagtctgagcccccggctagtaccctatagagagggggctctccaaaggggctgctggggcatgtgtgcctgtggcagaaaagaggagaccctggaattcagcaccctgggtgccattcccagcgtttagtttctagaggcctcagtttctccatcagcttatgggatccttgtctttactgacaagaatggaatagaaatgtaaaagtactctgaaaagcaattgccctgtaacttatctagaaagaaaagaccctgagactccagaatctgctgttgccatagccccatatgtgtgaattctgcaactagccaaggctagttcctttcaattccatttaaaaaacaaaaaccagcaggtgtggtggctcatggcgtaatgggcctgcccaatgctttgggaggccaaggcaggtagatcgcttgagcccaggagtttgagacaagccctggcaacatagtgagatcccatttctacaaaaaaaaaaaaaaaaaaattagccgggtgtggtggcacacgcctgtagtctcagctactcaggtggctgaggtgggaggatcgtttgagccctggaggttgaggctgcagtgagctgtgatcgcaccactgcactctggcctgggcgacagagtgagacactgtctgagaacaaaaaacgactgaaaaaaaaaatcaccttagctttttctcttagaatcttctctaaaacgtattctttgtggcattctgaaataggattcatgatgatgcctgttgatcttagggacactacctcacctgccagtatctttggggctgtgtccttcaaggacatgtccccagactgctgtgcagtgtcattttttgtgtttggtttggtggtggcttcttcccccttgctaggctatcaacctcttatcaccacttgttggtgtcagaactaactgcttctggtctggagagggactgaccgatgcctttgggtagagagaattatgaaagaaattttggtatttttctactttatattttctgaggtttctgtaataagcatatttcacttttccaataagaaaaaaaaaaacttggcctggcgcggtggctcacacctgtaatcccagcactttgggaagtcgaggtgggaggatcacttgagttcaggagttcgagaccagcttgggcaatatggtgaaaccccgtctctactaaaaatacaaaaattagccaggcgtggtggcgtgcacttgtagtcccagctactcaggaagctgaggcgggagaatcacttgaacccgggaggcagaggttgcagtgagctgagatcactcctctgcttcagcctgggcaattgagccagactctgtctcaaaaataaacaaaaaaacttgac

SEQ ID NO: 219 - DNA, 3340 bp, HOMO SAPIENS
agtgacgcaaggcctactgtcggctgggaggggaggtgtagccggtctttgggggtaggcggtagtggcggaagaggttcggcggctgatggcggatcaggatcggaagcctgcgtaactttctcccttgatccgggagtctttccactggattcacaatgacatcctttcaagaagtcccattgcagacttccaactttgcccatgtcatctttcaaaatgtggccaagagttaccttcctaatgcacacctggaatgtcattacaccttaactccatatattcatccacatccaaaagattgggttggtatattcaaggttggatggagtactgctcgtgattattacacgtttttatggtcccctatgcctgaacattatgtggaaggatcaacagtcaattgtgtactagcattccaaggatattaccttccaaatgatgatggagaattttatcagttctgttacgttacccataagggtgaaattcgtggagcaagtacacctttccagtttcgagcttcttctccagttgaagagctgcttactatggaagatgaaggaaattctgacatgttagtggtgaccacaaaagcaggccttcttgagttgaaaattgagaaaaccatgaaagaaaaagaagaactgttaaagttaattgccgttctggaaaaagaaacagcacaacttcgagaacaagttgggagaatggaaagagaacttaaccatgagaaagaaagatgtgaccaactgcaagcagaacaaaagggtcttactgaagtaacacaaagcttaaaaatggaaaatgaagagtttaagaagaggttcagtgatgctacatccaaagcccatcagcttgaggaagatattgtgtcagtaacacataaagcaattgaaaaagaaaccgaattagacagtttaaaggacaaactcaagaaggcacaacatgaaagagaacaacttgaatgtcagttgaagacagagaaggatgaaaaggaactttataaggtacatttgaagaatacagaaatagaaaataccaagcttatgtcagaggtccagactttaaaaaatttagatgggaacaaagaaagcgtgattactcatttcaaagaagagattggcaggctgcagttatgtttggctgaaaaggaaaatctgcaaagaactttcctgcttacaacctcaagtaaagaagatacttgttttttaaaggagcaacttcgtaaagcagaggaacaggttcaggcaactcggcaagaagttgtctttctggctaaagaactcagtgatgctgtcaacgtacgagacagaacgatggcagacctgcatactgcacgcttggaaaacgagaaagtgaaaaagcagttagctgatgcagtggcagaacttaaactaaatgctatgaaaaaagatcaggacaagactgatacactggaacacgaactaagaagagaagttgaagatctgaaactccgtcttcagatggctgcagaccattataaagaaaaatttaaggaatgccaaaggctccaaaaacaaataaacaaactttcagatcaatcagctaataataataatgtcttcacaaagaaaacggggaatcagcagaaagtgaatgatgcttcagtaaacacagacccagccacttctgcctctactgtagatgtaaagccatcaccttctgcagcagaggcagattttgacatagtaacaaaggggcaagtctgtgaaatgaccaaagaaattgctgacaaaacagaaaagtataataaatgtaaacaactcttgcaggatgagaaagcaaaatgcaataaatatgctgatgaacttgcaaaaatggagctgaaatggaaagaacaagtgaaaattgctgaaaatgtaaaacttgaactagctgaagtacaggacaattataaagaacttaaaaggagtctagaaaatccagcagaaaggaaaatggaagatggagcagatggtgctttttacccagatgaaatacaaaggccacctgtcagagtcccctcttggggactggaagacaatgttgtctgcagccagcctgctcgaaactttagtcggcctgatggcttagaggactctgaggatagcaaagaagatgagaatgtgcctactgctcctgatcctccaagtcaacatttacgtgggcatgggacaggcttttgctttgattccagctttgatgttcacaagaagtgtcccctctgtgagttaatgtttcctcctaactatgatcagagcaaatttgaagaacatgttgaaagtcactggaaggtgtgcccgatgtgcagcgagcagttccctcctgactatgaccagcaggtgtttgaaaggcatgtgcagacccattttgatcagaatgttctaaattttgactagttactttttattatgagttaatatagtttagcagtaaaaaaaaaaaaaaaaaccacacctaaaatagaccactgaggagaccatagagcggatgctttcatgcaccctttactgcactttctgaccaggagctactttgagtttggtgttactaggatcagggtcagtctttggcttatcaataaattttaatctctgttaatcttacctgctttaaaaaaaagttcttgtgtgttcgtatctttatttattccctagtttgcagaactgtctgaataaaggatacaaggattatttcaatgttactgcactgaaaaacgtgtatgtattagtgtgctagattatttagcagaatattcacaagtttctgttgaccttgttgattgagcatgactactaaatattatgtaataaaaagcatttgtcataacagtcttatgaagtagttcttcgaatatagaaagttctataatttagcccatgaaatgataggtttttaattttcagaaatggagctgcatgtagaatgagatcacatgcttttatatgtgaaatattggttttagcaattaacagaaggcatactttgctaattttatggcaaaattttagaataacctgaatgattatttttaaactatcttgaagttgtatgtatatatctaatgggaaaatggaacaagagatgtcagtataattgttttcctattaaatgatctcataacaggggtgtttgtggcataaaaatcatagaatatatatcagtatcttttttacattttcctgatgagaatataaatttgaaatattctcagtaagtgattaaaagtacaatacataaacccaaatcaaagtaatgtgtttcttcagttatgtctgtgctgtatagaactgtcactaacattaaagaaagaggacacatttttcaagatctgtaa

SEQ ID NO: 220 - DNA, 2251 bp, HOMO SAPIENS
cgaagcactaggccgtttgaggatctccgctccgctttgcctgggaccaggaaaagacgcgagagacggaactcggcatcaggcactgcttggggcaggaggagagtaggggaaaccaaggaagagaacagaaaggtaagcaccagccacaaaaacctacaaaagaagggaaattactgtctttaaatattaaaaaaaaacaagatccatgagtgggcatcgatcaacaaggaaaagatgtggagattctcacccggagtccccagtgggcttcgggcatatgagtactacaggatgtgtattaaataaattgtttcagttaccaacaccaccattgtcaagacaccaactaaagcggctagaagaacacagatatcaaagtgctggacggtccctgcttgagcccttaatgcaagggtattgggaatggctcgttagaagagttccctcctggattgccccaaatctcatcaccatcattggactgtcaataaacatctgtacaactattttattagtcttctactgccctacagctacagagcaggcacctctgtgggcatatattgcttgtgcctgtggccttttcatttaccagtctttggatgctattgatgggaaacaggcaagaagaaccaatagtagttctcctctgggagaactttttgatcatggctgtgattcactatcaacagtttttgtggttcttggaacttgtattgcagtgcagctggggacaaaccctgattggatgtttttttgttgttttgcggggacatttatgttctattgtgcgcactggcaaacgtatgtttctggaacattgcgatttggaataattgatgtgactgaagtgcaaatcttcataataatcatgcatttgctggcagtgattggaggaccacctttttggcaatctatgattccagtgctgaatattcaaatgaaaatttttcctgcactttgtactgtagcagggaccatattttcctgtacaaattacttccgtgtaatcttcacaggtggtgttggcaaaaatggatcaacaatagcaggaacaagtgtcctttctccttttctccatattggatcagtgattacattagctgcaatgatctacaagaaatctgcagttcagctttttgaaaagcatccctgtctttatatactgacatttggttttgtgtctgctaaaatcactaataagcttgtggttgcacacatgacgaaaagtgaaatgcatttgcatgacacagcattcataggtccggcacttttgtttctggaccagtattttaacagctttattgatgaatatattgtactttggattgccctggttttctctttctttgatttgatccgctactgtgtcagtgtttgcaatcagattgcgtctcacctgcacatacatgtcttcagaatcaaggtctctacagctcattctaatcatcattaatgatgtaattggtatataggaacatcatgttttctgcaggaaagaaagtaacatattaaggagaatgggggtggataagaacaaatataatttataataatcaatgttgtataacttttattctttattattggtaacacgccctaactatcctgtgtgagaatgggaatttcaagtcccatcttgtaaattgtatatgttgtcatgcagggtttgggccaagaaagcatgcagaaaaaaatgccatgtgattgtaattatcctggattcagaataatactgtgatggggagccagatccgcagtggtggagagttctaatgttgactgtttgcaggccaaaagatgattgctttataattttaacaaatcattgtcttttagtaacatccttgtttagtgtcttctcaagctttctttactgaggaattcagcttgtgacacagatacatcccactagcttgtgaggtggaactagtaataaagaccttgaatttggattgaaaagtttcctatctttacattgttgaggaagtccttttttttttttttttttttttaattgctcaagaaatgattctctcacaggcttgggaaatcctgttagcatgcagaataatgtggtaactttgtcaatttcccattttatttttttaaataaatatatgatctaaaagccaactttttctcagttttactcagtggaaagataaactaagttttaatgttatttttttaaatttaagcaaaatttatttctgttctttaataaataagaaaatgtggtccactg

SEQ ID NO: 221 - DNA, 1318 bp, HOMO SAPIENS
ctgagctctgagcgcctgcggtctcctgtgtgctgctctctgtggggtcctgtagacccagagaggctcagctgcactcgcccggctgggagagctgggtgtggggaacatggccgggcctccgaggctcctgctgctgcccctgcttctggcgctggctcgcggcctgcctggggccctggctgcccaagaggtgcagcagtctccccactgcacgactgtccccgtgggagcctccgtcaacatcacctgctccaccagcgggggcctgcgtgggatctacctgaggcagctcgggccacagccccaagacatcatttactacgaggacggggtggtgcccactacggacagacggttccggggccgcatcgacttctcagggtcccaggacaacctgactatcaccatgcaccgcctgcagctgtcggacactggcacctacacctgccaggccatcacggaggtcaatgtctacggctccggcaccctggtcctggtgacagaggaacagtcccaaggatggcacagatgctcggacgccccaccaagggcctctgccctccctgccccaccgacaggctccgccctccctgacccgcagacagcctctgccctccctgacccgccagcagcctctgccctccctgcggccctggcggtgatctccttcctcctcgggctgggcctgggggtggcgtgtgtgctggcgaggacacagataaagaaactgtgctcgtggcgggataagaattcggcggcatgtgtggtgtacgaggacatgtcgcacagccgctgcaacacgctgtcctcccccaaccagtaccagtgacccagtgggcccctgcacgtcccgcctgtggtccccccagcaccttccctgccccaccatgccccccaccctgccacacccctcaccctgctgtcctcccacggctgcagcagagtttgaagggcccagccgtgcccagctccaagcagacacacaggcagtggccaggccccacggtgcttctcagtggacaatgatgcctcctccgggaagccttccctgcccagcccacgccgccaccgggaggaagcctgactgtcctttggctgcatctcccgaccatggccaaggagggcttttctgtgggatgggcctgggcacgcggccctctcctgtcagtgccggcccacccaccagcaggcccccaacccccaggcagcccggcagaggacgggaggagaccagtcccccacccagccgtaccagaaataaaggcttctgtgcttcctttaaaaaaaaaaaaaaaaaaaaaaaaaaaaaaaaaaa

SEQ ID NO: 222 - DNA, 8550 bp, HOMO SAPIENS
gagtctttgaggacacagcctcgctggaggcagtttctggtgccagtgacggggtggcccgtgagctgatgacgaggactggcttttaatccttggtggtgattaagagaaagcttattggggcctgggagcagctccccgccgacccccaccaccatgtcgggatccacacagcctgtggcacagacgtggagggccactgagccccgctacccgccccacagcctttcctacccagtgcagatcgcccggacgcacacggacgtcgggctcctggagtaccagcaccactcccgcgactatgcctcccacctgtcgcccggctccatcatccagccccagcggcggaggccctccctgctgtctgagttccagcccgggaatgaacggtcccaggagctccacctgcggccagagtcccactcatacctgcccgagctggggaagtcagagatggagttcattgaaagcaagcgccctcggctagagctgctgcctgaccccctgctgcgaccgtcacccctgctggccacgggccagcctgcgggatctgaagacctcaccaaggaccgtagcctgacgggcaagctggaaccggtgtctccccccagccccccgcacactgaccctgagctggagctggtgccgccacggctgtccaaggaggagctgatccagaacatggaccgcgtggaccgagagatcaccatggtagagcagcagatctctaagctgaagaagaagcagcaacagctggaggaggaggctgccaagccgcccgagcctgagaagcccgtgtcaccgccgcccatcgagtcgaagcaccgcagcctggtgcagatcatctacgacgagaaccggaagaaggctgaagctgcacatcggattctggaaggcctggggccccaggtggagctgccgctgtacaaccagccctccgacacccggcagtatcatgagaacatcaaaataaaccaggcgatgcggaagaagctaatcttgtacttcaagaggaggaatcacgctcggaaacaatgggagcagaagttctgccagcgctatgaccagctcatggaggcctgggagaagaaggtggagcgcatcgagaacaacccccggcggcgggccaaggagagcaaggtgcgcgagtactacgagaagcagttccctgagatccgcaagcagcgcgagctgcaggagcgcatgcagagcagggtgggccagcggggcagtgggctgtccatgtcggccgcccgcagcgagcacgaggtgtcagagatcatcgatggcctctcagagcaggagaacctggagaagcagatgcgccagctggccgtgatcccgcccatgctgtacgacgctgaccagcagcgcatcaagttcatcaacatgaacgggcttatggccgaccccatgaaggtgtacaaagaccgccaggtcatgaacatgtggagtgagcaggagaaggagaccttccgggagaagttcatgcagcatcccaagaactttggcctgatcgcatcattcctggagaggaagacagtggctgagtgcgtcctctattactacctgactaagaagaatgagaactataagagcctggtgagacggagctatcggcgccgcggcaagagccagcagcagcaacaacagcagcagcagcagcagcagcagcagcagcagcagcccatgccccgcagcagccaggaggagaaagatgagaaggagaaggaaaaggaggcggagaaggaggaggagaagccggaggtggagaacgacaaggaagacctcctcaaggagaagacagacgacacctcaggggaggacaacgacgagaaggaggctgtggcctccaaaggccgcaaaactgccaacagccagggaagacgcaaaggccgcatcacccgctcaatggctaatgaggccaacagcgaggaggccatcaccccccagcagagcgccgagctggcctccatggagctgaatgagagttctcgctggacagaagaagaaatggaaacagccaagaaaggtctcctggaacacggccgcaactggtcggccatcgcccggatggtgggctccaagactgtgtcgcagtgtaagaacttctacttcaactacaagaagaggcagaacctcgatgagatcttgcagcagcacaagctgaagatggagaaggagaggaacgcgcggaggaagaagaagaaagcgccggcggcggccagcgaggaggctgcattcccgcccgtggtggaggatgaggagatggaggcgtcgggcgtgagcggaaatgaggaggagatggtggaggaggctgaagccactgtcaacaacagctcagacaccgagagcatcccctctcctcacactgaggccgccaaggacacagggcagaatgggcccaagcccccagccaccctgggcgccgacgggccacccccagggccacccaccccaccaccggaggacatcccggcccccactgagcccaccccggcctctgaagccaccggagcccctacgcccccaccagcacccccatcgccctctgcacctcctcctgtggtccccaaggaggagaaggaggaggagaccgcagcagcgcccccagtggaggagggggaggagcagaagccccccgcggctgaggagctggcagtggacacagggaaggccgaggagcccgtcaagagcgagtgcacggaggaagccgaggaggggccggccaagggcaaggacgcggaggccgctgaggccacggccgagggggcgctcaaggcagagaagaaggagggcgggagcggcagggccaccacagccaagagctcgggcgccccccaggacagcgactccagtgctacctgcagtgcagacgaggtggatgaggccgagggcggcgacaagaaccggctgctgtccccaaggcccagcctcctcaccccgactggcgacccccgggccaatgcctcaccccagaagccactggacctgaagcagctgaagcagcgagcggctgccatcccccccatccaggtcaccaaagtccatgagcccccccgggaggacgcagctcccaccaagccagctcccccagccccaccgccaccgcaaaacctgcagccggagagcgacgcccctcagcagcctggcagcagcccccggggcaagagcaggagcccggcaccccccgccgacaaggaggcagagaagcctgtgttcttcccagccttcgcagccgaggcccagaagctgcctggggaccccccttgctggacttccggcctgcccttccccgtgcccccccgtgaggtgatcaaggcctccccgcatgccccggacccctcagccttctcctacgctccacctggtcacccactgcccctgggcctccatgacactgcccggcccgtcctgccgcgcccacccaccatctccaacccgcctcccctcatctcctctgccaagcaccccagcgtcctcgagaggcaaataggtgccatctcccaaggaatgtcggtccagctccacgtcccgtactcagagcatgccaaggccccggtgggccctgtcaccatggggctgcccctgcccatggaccccaaaaagctggcacccttcagcggagtgaagcaggagcagctgtccccacggggccaggctgggccaccggagagcctgggggtgcccacagcccaggaggcgtccgtgctgagagggacagctctgggctcagttccgggcggaagcatcaccaaaggcattcccagcacacgggtgccctcggacagcgccatcacataccgcggctccatcacccacggcacgccagctgacgtcctgtacaagggcaccatcaccaggatcatcggcgaggacagcccgagtcgcttggaccgcggccgggaggacagcctgcccaagggccacgtcatctacgaaggcaagaagggccacgtcttgtcctatgagggtggcatgtctgtgacccagtgctccaaggaggacggcagaagcagctcaggacccccccatgagacggccgcccccaagcgcacctatgacatgatggagggccgcgtgggcagagccatctcctcagccagcatcgaaggtctcatgggccgtgccatcccgccggagcgacacagcccccaccacctcaaagagcagcaccacatccgcgggtccatcacacaagggatccctcggtcctacgtggaggcacaggaggactacctgcgtcgggaggccaagctcctaaagcgggagggcacgcctccgcccccaccgccctcacgggacctgaccgaggcctacaagacgcaggccctgggccccctgaagctgaagccggcccatgagggcctggtggccacggtgaaggaggcgggccgctccatccatgagatcccgcgcgaggagctgcggcacacgcccgagctgcccctggccccgcggccgctcaaggagggctccatcacgcagggcaccccgctcaagtacgacaccggcgcgtccaccactggctccaaaaagcacgacgtacgctccctcatcggcagccccggccggacgttcccacccgtgcacccgctggatgtgatggccgacgcccgggcactggaacgtgcctgctacgaggagagcctgaagagccggccagggaccgccagcagctcggggggctccattgcgcgcggcgccccggtcattgtgcctgagctgggtaagccgcggcagagccccctgacctatgaggaccacggggcaccctttgccggccacctcccacgaggttcgcccgtgaccacgcgggagcccacgccgcgcctgcaggagggcagcctttcgtccagcaaggcatcccaggaccgaaagctgacgtcgacgcctcgtgagatcgccaagtccccgcacagcaccgtgcccgagcaccacccacaccccatctcgccctatgagcacctgcttcggggcgtgagtggcgtggacctgtatcgcagccacatccccctggccttcgaccccacctccataccccgcggcatccctctggacgcagccgctgcctactacctgccccgacacctggcccccaaccccacctacccgcacctgtacccaccctacctcatccgcggctaccccgacacggcggcgctggagaaccggcagaccatcatcaatgactacatcacctcgcagcagatgcaccacaacgcggccaccgccatggcccagcgagctgatatgctgaggggcctctcgccccgcgagtcctcgctggcactcaactacgctgcgggtccccgaggcatcatcgacctgtcccaagtgccacacctgcctgtgctcgtgcccccgacaccaggcaccccagccaccgccatggaccgccttgcctacctccccaccgcgccccagcccttcagcagccgccacagcagctccccactctccccaggaggtccaacacacttgacaaaaccaaccaccacgtcctcgtccgagcgggagcgagaccgggatcgagagcgggaccgggatcgggagcgggaaaagtccatcctcacgtccaccacgacggtggagcacgcacccatctggagacctggtacagagcagagcagcggcagcagcggcagcagcggcgggggtgggggcagcagcagccgccccgcctcccactcccatgcccaccagcactcgcccatctcccctcggacccaggatgccctccagcagagacccagtgtgcttcacaacacaggcatgaagggtatcatcaccgctgtggagcccagcacgcccacggtcctgaggtccacctccacctcctcacccgttcgcccggctgccacattcccacctgccacccactgcccactgggcggcaccctcgatggggtctaccctaccctcatggagcccgtcttgctgcccaaggaggccccccgggtcgcccggccagagcggccccgagcagacaccggccatgccttcctcgccaagcccccagcccgctccgggctggagcccgcctcctcccccagcaagggctcggagccccggcccctagtgcctcctgtctctggccacgccaccatcgcccgcacccctgcgaagaacctcgcacctcaccacgccagcccggacccgccggcgccacctgcctcggcctcggacccgcaccgggaaaagactcaaagtaaacccttttccatccaggaactggaactccgttctctgggttaccacggcagcagctacagccccgaaggggtggagcccgtcagccctgtgagctcacccagtctgacccacgacaaggggctccccaagcacctggaagagctcgacaagagccacctggagggggagctgcggcccaagcagccaggccccgtgaagcttggcggggaggccgcccacctcccacacctgcggccgctgcctgagagccagccctcgtccagcccgctgctccagaccgccccaggggtcaaaggtcaccagcgggtggtcaccctggcccagcacatcagtgaggtcatcacacaggactacacccggcaccacccacagcagctcagcgcacccctgcccgcccccctctactccttccctggggccagctgccccgtcctggacctccgccgcccacccagtgacctctacctcccgcccccggaccatggtgccccggcccgtggctccccccacagcgaagggggcaagaggtctccagagccaaacaagacgtcggtcttgggtggtggtgaggacggtattgaacctgtgtccccaccggagggcatgacggagccagggcactcccggagtgctgtgtacccgctgctgtaccgggatggggaacagacggagcccagcaggatgggctccaagtctccaggcaacaccagccagccgccagccttcttcagcaagctgaccgagagcaactccgccatggtcaagtccaagaagcaagagatcaacaagaagctgaacacccacaaccggaatgagcctgaatacaatatcagccagcctgggacggagatcttcaatatgcccgccatcaccggaacaggccttatgacctatagaagccaggcggtgcaggaacatgccagcaccaacatggggctggaggccataattagaaaggcactcatgggtggcggcgggaaggccaaggtctctggcagacccagcagccgaaaagccaagtccccggccccgggcctggcatctggggaccggccaccctctgtctcctcagtgcactcggagggagactgcaaccgccggacgccgctcaccaaccgcgtgtgggaggacaggccctcgtccgcaggttccacgccattcccctacaaccccctgatcatgcggctgcaggcgggtgtcatggcttccccacccccaccgggcctccccgcgggcagcgggcccctcgctggcccccaccacgcctgggacgaggagcccaagccactgctctgctcgcagtacgagacactctccgacagcgagtgactcagaacagggcgggggggggggcggtgtcaggtcccagcgagccacaggaacggccctgcaggagcagggcggctgccgactcccccaaccaaggaaggagcccctgagtccgcctgcgcctccatccatctgtccgtccagagccggcatccttgcctgtctaaagccttaactaagactcccgccccgggctggccctgtgcagaccttactcaggggatgtttacctggtgctcgggaagggaggggaaggggccggggagggggcacggcaggcgtgtggcagccacacgcaggcggccagggcggccagggacccaaagcaggatgaccacgcacctccacgccactgcctcccccgaatgcatttggaaccaaagtctaaactgagctcgcagcccccgcgccctccctccgcctcccatcccgcttagcgctctggacagatggacgcaggccctgtccagcccccagtgcgctcgttccggtccccacagactgccccagccaacgagattgctggaaaccaagtcaggccaggtgggcggacaaaagggccaggtgcggcctggggggaacggatgctccgaggactggactgtttttttcacacatcgttgccgcagcggtgggaaggaaaggcagatgtaaatgatgtgttggtttacagggtatatttttgataccttcaatgaattaattcagatgttttacgcaaggaaggacttacccagtattactgctgctgtgcttttgatctctgcttaccgttcaagaggcgtgtgcaggccgacagtcggtgaccccatcactcgcaggaccaagggggcggggactgctggctcacgccccgctgtgtcctccctccctcccttccttgggcagaatgaattcgatgcgtattctgtggccgccatctgcgcagggtggtggtattctgtcatttacacacgtcgttctaattaaaaagcgaattatactccaaaaaaaaaaaaaaaaaaa

SEQ ID NO: 223 - DNA, 1888 bp, HOMO SAPIENS
gtcttcttcggtggcgatccgcgtcctagaaagggcggtgggctccacctcggcctagaaggccagcgggagccgtaggaagccgtcgcgggaagctcagccgaattggagttggagcccccggattgcgctgaccctgagctctcagactccccagtacaatgactcaagcagaaattaagctctgttctttgttgctgcaagagcattttggagagattgtagaaaaaattggagtccatctgataagaaccggcagccagccactaagagtaattgcccatgacacaggaacatcactggatcaggtgaagaaagccctgtgtgtcctcgtccaacataacctggtgagttatcaagtgcacaaacgtggtgtggtggagtatgaagcccagtgcagccgggtattgcgaatgcttagatatccccggtacatctatactaccaaaactctgtacagtgacactggagagctgattgttgaggagcttctgttgaacggcaaactgacaatgtcagctgttgtgaagaaagtggcagaccggctcacagagaccatggaggatggcaagaccatggactatgctgaagtatcaaacacatttgtgcgactggcagacacacactttgtacaacgctgcccttcggtacctaccactgagaattcagaccctgggccaccaccacctgcccccacacttgtcattaatgaaaaggacatgtacctggttcctaaactcagcttgatagggaaaggtaaaaggaggagatcatctgatgaagatgctgctggggagcccaaggccaagagaccaaaatatactacagataacaaggagcccattccagatgatgggatttattggcaggccaaccttgacagattccaccaacacttccgtgaccaagccattgtgagcgcagttgctaacaggatggaccagacaagcagcgagattgtgcgaaccatgctccgaatgagtgagattaccacttcctctagtgctcccttcacccagccattgtcttccaatgagatcttcagatccctacctgttggctataacatctctaagcaagttcttgatcagtatctcactctgctggcagatgatccactagagtttgttggaaagtctggcgacagtggtggaggaatgtatgtcatcaacctccataaggcattagcatccctagccacagccactctggagtccgtcgtacaggagagatttgggtctcgctgtgctagaatattccgtctagttttgcagaagaaacacatagagcagaagcaagtggaagactttgcaatgattcctgcaaaggaggcaaaggatatgctatataagatgctctcagaaaatttcatgtcactccaggaaattcccaaaacaccagaccatgccccatccaggaccttctatttatatactgtgaacatcctgtcagctgcccgaatgttgttgcacaggtgctacaagagcatagccaacttgatagaaaggaggcaatttgaaaccaaagagaataagcgtctactagaaaaatctcagagggtagaagccatcattgcatctatgcaggctactggtgcagaggaagcacagttacaagaaatagaggagatgatcacagctcctgaacgtcagcagctagagaccctgaaacgtaatgtcaacaagttggatgccagtgagatccaggtggacgaaaccatcttcctgctggagtcttacattgagtgcaccatgaagagacagtgatccagaagaagcatcttcctcagaagatctggggggatggaaagcaaaataaaggaggtgcctggatgcattatttgcagtgggaaaaaaaaaaaaaaaaaaaaaaaaaaaaaaaaaaaaaa

SEQ ID NO: 224 - DNA, 4170 bp, HOMO SAPIENS
agacgtcgggtcggcgggtggatgaacgcggccctctgtaatggcggagcgtggcggggacgggggcgagagtgaacgattcaacccgggggagctcaggatggcccaacagcaggccttgaggttccgaggtccggctcccccaccaaatgcagtgatgcgaggcccaccacctctgatgcgacctcctccaccttttggtatgatgcgaggccctcctccaccaccacggccgccctttggacgtcctccttttgatcctaatatgccgccaatgcctcctccaggagggatacctccacctatgggccctccacacctccagagaccacctttcatgcctcctcccatgagttccatgcctcctcctccgggtatgatgtttccaccaggaatgcctcctgtgactgctcctggtactccagcactacctcctacggaggagatatgggttgaaaataaaactccagatgggaaggtttattattataatgctcggacacgtgaatctgcatggaccaagccagatggagttaaggttattcagcaatcagaactgacacctatgcttgcagcccaggcacaggttcaggctcaggcccaggcgcaggctcaggcccaggcgcaggctcaggcccaggcacaagctcaggcccaggctcaggctcaggcccaggcccaggcccaggcccaggcccaggcccaagcccaagcccaggcccaggctcaggctcaggcacaagctcaggcccaggcccaggctcaggtccaggcccaggtccaggcacaagtgcaagcacaagcagttggagcttccacccctacgaccagtagcccagcacctgcagtatccacttcaacatcatcatccaccccttcctctaccacttctaccacaacaactgctacttcagttgcgcagacagtatcaacacccacaacacaagatcagaccccaagttctgctgtttcagttgccacgcctacagttagtgtttcaactcctgctcctacagccacacctgtgcaaaccgttccccagccgcaccctcagacgttacctcctgctgttcctcattcagtacctcagccaacaacagcaatacctgcttttccaccagtaatggtacctccgtttcgtgttccccttcctggcatgccaattccacttccaggtgtattgccaggaatggcccctcctatcgtacccatgatacatccccaggttgctattgcagcttcacctgctaccttagctggagcaacagcagtttctgaatggactgaatataaaacagcagatgggaagacatattattataataatagaacattagaatcaacctgggaaaaaccccaagaactaaaggaaaaagaaaagttagaagagaagattaaagagccaattaaagaaccctctgaagagcctctgccaatggagacggaggaggaggatcctaaagaagagcctataaaggagataaaggaggagcccaaagaagaggagatgactgaagaagaaaaggctgcccagaaggcaaagccagttgctactgctcctattcctggtactccatggtgtgtcgtttggactggtgatgagcgggtcttcttttataatcccaccactcgtctttctatgtgggaccgacctgatgatctgattggcagggcagatgttgacaaaattattcaggagccccctcataaaaaaggaatggaggaattgaagaaactaaggcacccaactccgacaatgctgtcgatccaaaagtggcaattctctatgagtgcaattaaagaggaacaagaattaatggaagaaattaatgaagatgagcctgttaaagcaaaaaaacggaagagagacgataataaagacattgactcagagaaagaagctgccatggaagctgaaattaaagctgcccgagaaagggccattgtccctctggaggctcgaatgaagcagttcaaggacatgctgctagagagaggggtgtctgctttttcaacgtgggagaaggagttgcacaagatagtttttgatccccggtacttacttctcaatcctaaagagagaaaacaggtgtttgatcagtatgtaaagaccagggcagaggaagaacgcagggaaaagaaaaataaaataatgcaagccaaggaagatttcaaaaaaatgatggaagaagcaaaatttaatccaagagcaacttttagtgaatttgcagccaagcatgctaaagattcaagattcaaagcaattgaaaagatgaaagaccgagaagccttgtttaatgagtttgtggccgctgctaggaagaaagagaaagaagattcgaagaccagaggtgagaagattaaatcggatttctttgaactattatctaatcatcacttggacagtcagtctcgatggagcaaagtaaaagacaaagtagaaagtgatccacgttacaaagcagtagatagttcatcaatgagagaagaccttttcaaacagtacattgaaaaaatagccaagaatttagactcagaaaaagaaaaggagcttgaaaggcaagcccgcattgaggcaagccttcgagaacgagaaagggaggttcaaaaggcccgttcagaacaaacaaaagaaatagatcgagagagagagcagcacaaacgagaagaagctatccagaatttcaaagctcttctgtctgacatggtacgttcttcagatgtgtcatggtctgatactcgtaggaccctccgaaaagatcaccgctgggaatctggatccttattggaaagagaggagaaagagaagctttttaatgaacacattgaagcacttaccaaaaaaaagagagagcactttaggcaacttctggatgaaacttctgcaattaccttaacatccacgtggaaagaagtaaaaaaaatcattaaggaagatcctcgatgtattaagttctcctccagtgacaggaaaaaacaaagagaatttgaagaatatatcagagacaaatatatcacagccaaagctgacttcaggacgcttttgaaagagaccaaatttataacatatagatccaaaaaattaatccaagaatcagatcagcacctgaaagatgtagaaaaaattttacagaatgacaaacggtatctagtactggactgtgtgccagaggagaggcgtaaactgattgtggcatatgttgatgacctggatcgccggggtccacccccacctcccacagcatcggagcccacgagacgatcaacaaaataattctaaatactcttccataggggcatctattcaaaatgcttgcatgagccaattttcaggtttttacatatatgtgcattagtcaacctattgcgaaaccatctgacaaacagaaggagaagcatttgtgaacagtttctgaacagaacactttggaaatatttatgcttttctttgtgtggcatgactgacatacatactcaaatataggctgtctctagtaaatcttaaaatcttgaagctaaaattcatccttttatgaggtgtggaagtcagtgacttggtgacgttcttcctagcagtgttaatacatgcaagaagtaagagcatttgtggcttgaacttgccagatgcaaataccacagactccaagaaaacccgagttggggtttgttttgttttgattttttttttttaaagcgggtaaaagagaaaacactgaaaattgaattcttatcttccagaggctacaattattataatggacaatacttttacctttgtctctaaagatcagattagttttatttgttcacttacgtgctttgattatcccctctgaattatagaccgagtcttgttgtttagcctaagagaagatttatgtagtaatttcttctcaggtatggaaccacggtcataactaacatgttggccagaatagaaccactggttaaacatattttattcaccattaagtgatctttatcaatattctggattagacaacaaattacctttctgggtgtttcttgtaaactatactcctgtttgaatgttaaactttgttgctaaagtttaattttaagatgtttgaatgttcagtttatgtatttgaactacaataaaccaaccctttttataaaaaaaaaaaaaaaaaaaaaaaaaaaaaaaaa

SEQ ID NO: 225 - DNA, 3482 bp, HOMO SAPIENS
ccctaccgcccccaattccgccctgcccccgccgcggcggcgctagccgccactgagggaccgaccctataaaggccgctccgcgaggggtgcgcagcattcggcagagggcgcttcgacgggctgggctgtgcgcctgcgcagtgtgggtcgctcccgattccctgccccggccggccccgcctcggctccgcaccctcgccccgctctcagccgccgctctgccccgcagcagccagccccgtgtccggcagtatgttcagctgggtcagcaaggatgcccgccgcaagaaggagccggagctcttccagacggtggctgaggggctgcggcagctgtacgcgcagaagctgctacccctggaggagcactaccgcttccacgagttccactcgcccgcgctggaggacgctgacttcgacaacaagcctatggtgctcctcgtggggcagtacagcacgggcaagaccaccttcatccgacacctgatcgagcaggacttcccggggatgcgcatcgggcccgagcccaccaccgactccttcatcgccgtcatgcacggccccactgagggcgtggtgccgggcaacgcgctcgtggtggacccgcggcgccccttccgcaagctcaacgcgtttggcaacgctttcctcaacaggttcatgtgtgcccagctgcccaaccccgtcctggacagcatcagcatcatcgacacccccgggatcctgtctggagagaagcagcggatcagcagaggctatgactttgcagccgtcctggagtggttcgcggagcgtgtggaccgcatcatcctgctcttcgacgcccacaagctggacatctccgatgagttctcggaagtgatcaaggctctgaagaaccatgaggacaagatccgcgtggtgctgaacaaggcagaccagatcgagacgcagcagctgatgcgggtgtacggggccctcatgtggtccctgggcaagatcatcaacacccccgaggtggtcagggtctacatcggctccttctggtcccacccgctcctcatccccgacaaccgcaagctctttgaggccgaggagcaggacctcttcaaggacatccagtcactgccccgaaacgccgccctcaggaagctcaatgacctgatcaagcgggcacggctggccaaggttcacgcctacatcatcagctccctcaagaaagagatgcccaatgtctttggtaaagagagcaaaaagaaagagctggtgaacaacctgggagagatctaccagaagattgagcgcgagcaccagatctcccctggggacttcccgagcctccgcaagatgcaggaactcctgcagacccaggacttcagcaagttccaggcgctgaagcccaagctgctggacacggtggatgacatgctggccaacgacatcgcgcggctgatggtgatggtgcggcaggaggagtccctgatgccttcccaggtggtcaagggcggcgcctttgacggcaccatgaacgggccgttcgggcacggctacggcgagggggccggcgagggcatcgacgacgtggagtgggtggtgggcaaggacaagcccacctacgacgagatcttctacacgctgtcccctgtcaacggcaagatcacgggcgccaacgccaagaaggagatggtgaagtccaagctccccaacaccgtgctagggaagatctggaagctggccgacgtggacaaggacgggctgctggacgacgaggagttcgcgctggccaaccacctcatcaaggtcaagctggagggccacgagctgcccgccgacctgcccccgcacctggtgccgccctccaagcgcagacatgagtgatggcgcccggccccgcacctgccatttgcacgcccggccgggaggcagagacggggggaggggaagcctcaccatttctcaaggtccataaagactgagcggatgtttcctcgcctctcgaaaaggaaaaccaccatctttcttttaaggctgttcctgggcctggcgggggaggcaggggtgagaggatggaattgtgtgcacaagaactgtggctattttaatatataacgttagaggctgcgttctttgtcgccgcctcccctgtgtgccagccctgtgtgcacggcctctgccccccggcctttgctgtggctggagctggacagtgcagcgactgcgaccgtgggggagccaggtcgcccttttggcagctgctaggctgaggctgcatggacaggaacaccaggcaccctccgtgtgcttctgagctgaggttgcttcacgggaccgtggcttccttcctcacctggctctgcctcccccgtgctctcgggcgaagtgggttcttgtgccttcccctcccgggcccaggctccccgtgcgcgggccctgccctttcctcccgcgccccaccggctccgacgcgcaaccccgctcagcagtcacagaagcagggcccagccaccttggtctttttttgggagttcaggggagtaggagaatgtcttccagaaaaatacataagctagtttctgttctgtaaagtgatatctttcatacttgaccaaagttcccaataacttcccaaccactgttcaaaagctgtgatttttgtctccccttcccaccctccagccaaggagcagccctgcccagggggcattaggtgtgggtacccggggagcaccccgttcctggaccccagtgttgcatttcctggctgaggaagggtggtcatcccagctcctgccctaccctctcacttaactggagctttgggacgcaccctccacagtgggaggtggtggtgggtggcggtggcggggcctcacgacagcttggtgctggtaagaggaagcccgtggttctggctaggctctcatgtccagacagcggggaccaggggaaaacccagccccttctgtaatcccccttcatttcctaccttccttcctcctctgtttagcaaaggagggcagctcacttggatgtccttacaacgcccctggcccccaggttgagcaataagaaaccagaaccttgcggcccagtggcccgggccagttcaggccgcctccccctcctctgcctggggccattgagcccagcctccagggcccgggcgcgtttgcaggccagtggccactgtccgggctgtgatggcaccaaggcaggtggagcaccaggtaccacacagctgggcttcccaccaggctttcccgcgggggtctcagggagcttctccccagcgctgctcggagtctgcaggaactggccttgttctccttagcccgtcactccatacagtattaggtgaggatggatgcgggcgctgtccttgccgggaagtcactgttgaagttgcagtggcttgttcacacctgtgggaagagaagtgaagactttctccttgcattaaaaagtctgaactgtgaaaaaaaaaaaaaaaaaaaaaaaaa

SEQ ID NO: 226 - DNA, 12778 bp, HOMO SAPIENS
cgcggcccgagcgcctcttttcgggattaaaagcgccgccagctcccgccgccgccgccgtcgccagcagcgccgctgcagccgccgccgccggagaagcaaccgctgggcggtgagatccccctagacatgcggctcgggggcgggcagctggtgtcagaggagctgatgaacctgggcgagagcttcatccagaccaacgacccgtcgctgaagctcttccagtgcgccgtctgcaacaagttcacgacggacaacctggacatgctgggcctgcacatgaacgtggagcgcagcctgtcggaggacgagtggaaggcggtgatgggggactcataccagtgcaagctctgccgctacaacacccagctcaaggccaacttccagctgcactgcaagacagacaagcacgtgcagaagtaccagctggtggcccacatcaaggagggcggcaaggccaacgagtggaggctcaagtgtgtggccatcggcaaccccgtgcacctcaagtgcaacgcctgtgactactacaccaacagcctggagaagctgcggctgcacacggtcaactccaggcacgaggccagcctgaagttgtacaagcacctgcagcagcatgagagtggtgtagaaggtgagagctgctactaccactgcgttctgtgcaactactccaccaaggccaagctcaacctcatccagcatgtgcgctccatgaagcaccagcgaagcgagagcctgcgaaagctgcagcggctgcagaagggccttccagaggaggacgaggacctggggcagatcttcaccatccgcaggtgcccctccacggacccagaagaagccattgaagatgttgaaggacccagtgaaacagctgctgatccagaggagcttgctaaggaccaagagggcggagcatcgtccagccaagcagagaaggagctgacagattctcctgcaacctccaaacgcatctccttcccaggtagctcagagtctcccctctcttcgaagcgaccaaaaacagctgaggagatcaaaccggagcagatgtaccagtgtccctactgcaagtacagtaatgccgatgtcaaccggctccgggtgcatgccatgacgcagcactcggtgcaacccatgcttcgctgccccctgtgccaggacatgctcaacaacaagatccacctccagctgcacctcacccacctccacagcgtggcacctgactgcgtggagaagctcattatgacggtgaccacccctgagatggtgatgccaagcagcatgttcctcccagcagctgttccagatcgagatgggaattccaatttggaagaggcaggaaagcagcctgaaacctcagaggatctgggaaagaacatcttgccatccgcaagcacagagcaaagcggagatttgaaaccatcccctgctgacccaggctctgtgagagaagactcaggcttcatctgctggaagaaggggtgcaaccaggttttcaaaacttctgctgcccttcagacgcattttaatgaagtgcatgccaagaggcctcagctgccggtgtcagatcgccatgtgtacaagtaccgctgtaatcagtgtagcctggccttcaagaccattgaaaagttgcagctccattctcagtaccatgtgatcagagctgccaccatgtgctgtctttgtcagcgcagtttccgaactttccaggctctgaagaagcaccttgagacaagccacctggagctgagtgaggctgacatccaacagctttatggtggcctgctggccaatggggacctcctggcaatgggagaccccactctggcagaggaccataccataattgttgaggaagacaaggaggaagagagtgacttggaagataaacagagcccaacgggcagtgactctgggtcagtacaagaagactcgggctcagagccaaagagagctctgcctttcagaaaaggtcccaattttactatggaaaagttcctagacccttctcgcccttacaagtgtaccgtctgcaaggaatctttcactcaaaagaatatcctgctagtacactacaattctgtctcccacctgcataagttaaagagagcccttcaagaatcagcaaccggtcagccagaacccaccagcagcccagacaacaaaccttttaagtgtaacacttgtaatgtggcctacagccagagttccactctggagatccatatgaggtctgtgttacatcaaaccaaggcccgggcagccaagctggaggctgcaagtggcagcagcaatgggactgggaacagcagcagtatttccttgagctcctccacgccaagtcctgtgagcaccagtggcagtaacacctttaccacctccaatccaagcagtgctggcattgctccaagctctaacttactaagccaagtgcccactgagagtgtagggatgccacccctggggaatcctattggtgccaacattgcttccccttcagagcccaaagaggccaatcggaagaaactggcagatatgattgcatccaggcagcagcaacaacagcagcagcaacagcaacaacaacaacaacaacaacaacaacaagcacaaacgctggcccaggcccaggctcaagttcaagctcacctgcagcaggagctgcagcaacaggctgccctgatccagtctcagctgtttaaccccaccctccttcctcacttccccatgacaactgagaccctgctgcaactacagcagcagcagcacctcctcttccctttctacatccccagtgctgagttccagcttaaccccgaggtgagcttgccagtgaccagtggggcactgacactgactgggacaggcccaggcctgctggaagatctgaaggctcaggttcaggtcccacagcagagccatcagcagatcttgccgcagcagcagcagaaccaactctctatagcccagagtcactctgccctccttcagccaagccagcaccccgaaaagaagaacaaattggtcatcaaagaaaaggaaaaagaaagccagagagagagggacagcgccgaggggggagagggcaacaccggtccgaaggaaacactgccagatgccttgaaggccaaagagaagaaagagttggcaccagggggtggttctgagccttccatgctccctccacgcattgcttcagatgccagagggaacgccaccaaggccctgctggagaactttggctttgagttggtcatccagtataatgagaacaagcagaaggtgcagaaaaagaatgggaagactgaccagggagagaacctggaaaagctcgagtgtgactcctgcggcaagttgttttccaacatcttgattttaaagagtcatcaagagcacgttcatcagaattactttcctttcaaacagctcgagaggtttgccaaacagtacagagaccactacgataaactgtacccactgaggccccagaccccagagccaccaccacctccccctccaccccctccacccccacttccggcagcgccgcctcagccggcgtccacaccagccatccccgcatcagccccacccatcacctcacctacaattgcaccggcccagccatcagtgccgctcacccagctctccatgccgatggagctgcccatcttctcgccgctgatgatgcagacgatgccgctgcagaccttgccggctcagctacccccgcagctgggacctgtggagcctctgcctgcggacctggcccaactctaccagcatcagctcaatccaaccctgctccagcagcagaacaagaggcctcgcaccaggatcacagatgatcagctccgagtcttgcggcaatattttgacattaacaactcccccagtgaagagcaaataaaagagatggcagacaagtccgggttgccccagaaagtgatcaagcactggttcaggaacactctcttcaaagagaggcagcgtaacaaggactccccttacaacttcagtaatcctcctatcaccagcctggaggagctcaagattgactcccggcccccttcgccggaacctccaaagcaggagtactggggaagcaagaggtcttcaagaacaaggtttacggactaccagctgagggtcttacaggacttcttcgatgccaatgcttacccaaaggatgatgaatttgagcaactctctaatttactgaaccttccaacccgagtgatagtggtgtggtttcagaatgcccgacagaaggccaggaagaattatgagaatcagggagagggcaaagatggagagcggcgtgagcttacaaatgatagatacattcgaacaagcaacttgaactaccagtgcaaaaaatgtagcctggtgtttcagcgcatctttgatctcatcaagcaccagaagaagctgtgttacaaggatgaggatgaggaggggcaggacgacagccaaaatgaggattccatggatgccatggaaatcctgacgcctaccagctcatcctgcagtaccccgatgccctcacaggcttacagcgccccagcaccatcagccaataatacagcttcctccgctttcttgcagcttacagcggaggctgaggaactggccaccttcaattcaaaaacagaggcaggcgatgagaaaccaaagctggcggaagctcccagtgcacagccaaaccaaacccaagaaaagcaaggacaaccaaagccagagctgcagcagcaagagcagcccgagcagaagaccaacactccccagcagaagctcccccagctggtgtccctgccttcgttgccacagcctcctccacaagcgccccctccacagtgccccttaccccagtcgagccccagtccttcccagctctcccacctgcccctcaagcccctccacacatcaactcctcaacagctcgcaaacctacctcctcagctaatcccctaccagtgtgaccagtgtaagttggcatttccgtcatttgagcactggcaggagcatcagcagctccacttcctgagcgcgcagaaccagttcatccacccccagtttttggacaggtccctggatatgcctttcatgctctttgatcccagtaacccactcctggccagccagctgctctctggggccatacctcagattccagcaagctcagccacttctccttcaactccaacctccacaatgaacactctcaagaggaagctggaggaaaaggccagtgcaagccctggcgaaaacgacagtgggacaggaggagaagagcctcagagagacaagcgtttgagaacaaccatcacaccggaacaactagaaattctctaccagaagtatctactggattccaatccgactcgaaagatgttggatcacattgcacacgaggtgggcttgaagaaacgtgtggtacaagtctggtttcagaacacccgagctcgggaaaggaaaggacagttccgggctgtaggcccagcgcaggcccacaggagatgccctttttgcagagcgctcttcaaagccaagactgctcttgaggctcatatccggtcccgtcactggcatgaagccaagagagctggctacaacctaactctgtctgcgatgctcttagactgtgatgggggactccagatgaaaggagatatttttgacggaactagcttttcccacctacccccaagcagtagtgatggtcagggtgtccccctctcacctgtgagtaaaaccatggaattgtcacccagaactcttctaagcccttcctccattaaggtggaagggattgaagactttgaaagcccctccatgtcctcagttaatctaaactttgaccaaactaagctggacaacgatgactgttcctctgtcaacacagcaatcacagataccacaactggagacgagggcaacgcagataacgacagtgcaacgggaatagcaactgaaaccaaatcctcttctgcacccaacgaagggttgaccaaagcggccatgatggcaatgtctgagtatgaagatcggttgtcatctggtctggtcagcccggccccgagcttttatagcaaggaatatgacaatgaaggtacagtggactacagtgaaacctcaagccttgcagatccctgctccccgagtcctggtgcgagtggatctgcaggcaaatctggtgacagcggagatcggcctgggcagaaacgttttcgcactcaaatgaccaatctgcagctgaaggtcctcaagtcatgctttaatgactacaggacacccactatgctagaatgtgaggtcctgggcaatgacattggactgccaaagagagtcgttcaggtctggttccagaatgcccgggcaaaagaaaagaagtccaagttaagcatggccaagcattttggtataaaccaaacgagttatgagggacccaaaacagagtgcactttgtgtggcatcaagtacagcgctcggctgtctgtacgtgaccatatcttttcccaacagcatatctccaaagttaaagacaccattggaagccagctggacaaggagaaagaatactttgacccagccaccgtacgtcagttgatggctcaacaagagttggaccggattaaaaaggccaacgaggtccttggactggcagctcagcagcaagggatgtttgacaacacccctcttcaggcccttaaccttcctacagcatatccagcgctccagggcattcctcctgtgttgctcccgggcctcaacagcccctccttgccaggctttactccatccaacacagctttaacgtctcctaagccgaacttgatgggtctgcccagcacaactgttccttcccctggcctccccacttctggattaccaaataaaccgtcctcagcgtcgctgagctccccaaccccagcacaagccacgatggcgatgggccctcagcaacccccccagcagcagcagcagcagcagcaaccacaggtgcagcagcctcccccgccgccagcagcccagccgccacccacaccacagctcccactgcaacagcagcagcaacgcaaggacaaagacagtgagaaagtaaaggagaaggaaaaggcacacaaagggaaaggggaacccctgcctgtccccaagaaggagaaaggagaggcccccacggcaactgcagccacgatctcagccccgctgcccaccatggagtatgcggtagaccctgcacagctgcaggccctgcaggccgcgttgacttcggaccccacagcattgctcacaagccagttccttccttactttgtaccaggcttttctccttattatgctccccagatccctggcgccctgcagagcgggtacctgcagcctatgtatggcatggaaggcctgttcccctacagccctgcactgtcgcaggccctgatggggctgtccccaggctccctactgcagcagtaccagcaataccagcagagtctgcaggaggcaattcagcagcagcagcagcggcaactacagcagcagcagcagcaaaaagtgcagcagcagcagcccaaagcaagccaaaccccagtcccccccggggctccttccccagacaaagaccctgccaaagaatcccccaaaccagaagaacagaaaaacaccccccgtgaggtgtcccccctcctgccgaaactccctgaagagccagaagcagaaagcaaaagtgcggactccctctacgaccccttcattgttccaaaggtgcagtacaagttggtctgccgcaagtgccaggcgggcttcagcgacgaggaggcagcgaggagccacctgaagtccctctgcttcttcggccagtctgtggtgaacctgcaagagatggtgcttcacgtccccaccggcggcggcggcggtggcagtggcggcggcggcggcggtggcggcggcggcggcggcggcggctcgtaccactgcctggcgtgcgagagcgcgctctgtggggaggaagctctgagtcaacatctcgagtcggccttgcacaaacacagaacaatcacgagagcagcaagaaacgccaaagagcaccctagtttattacctcactctgcctgcttccccgatcctagcaccgcatctacctcgcagtctgccgctcactcaaacgacagcccccctcccccgtcggccgccgccccctcctccgcttccccccacgcctccaggaagtcttggccgcaagtggtctcccgggcttcggcagcgaagcccccttcttttcctcctctctcctcatcttcaacggttacctcaagttcatgcagcacctcaggggttcagccctcgatgccaacagacgactattcggaggagtctgacacggatctcagccaaaagtccgacggaccggcgagcccggtggagggtcccaaagaccccagctgccccaaggacagtggtctgaccagtgtaggaacggacaccttcagattgtaagctttgaagatgaacaatacaaacaaatgaatttaaatacaaaaattaataacaaaccaatttcaaaaatagactaactgcaattccaaagcttctaaccaaaaaacaaaaaaaaaaaaaaaaagaaaaaaaagaaaaagcgtgggttgttttcccatatacctatctatgccggtgattttacattcttgtctttttcttttcttttaatattaaaaaaaaaaaaaaagccctaaccctgttacattgtgtccttttgaaggtactattggtctgggaaacagaagtccgcagggcctccctaatgtctttggagcttaaaccccttgtatatttgccccttttcaataaacgccccacgctgatagcacagaggagcccggcatgcactgtatgggaaagcagtccaccttgttacagttttaaatttcttgctatcttagcattcagataccaatggcttgctaaaagaaaaaaagaaatgtaatgtctttttattctcaggtcaatcgctcacactttgttttcagaatcattgttttatatattattgttttttcagtttttttttttttttttgttccagaaaagattttttgttttgttaacttaaaaatgggcagaaagtattcaagaaaaacaatgtgaactgctttagctttctggggatttttaaggatagcttttctgctgaagccaatttcaaggggaaaagttaagcactcccactttcaaaaaaaaaaaaaaataataacccacacacacaaagagtgttgaggacttgtagcttaaaaaaaataagttttaaaaactgactttctgtatttatgatagatatgaccatttttggtgttgagtagattgttgcattggaaatgaactgaagcagtatggtagatttaaaaggaaaaaaaaaaaaaaaccttttgtgtacatttagctttttgtatggtccagctgacagctcctcatttgatgttgtcttgttcattcctagcagatgatagattgcaatccgttgattcgcctaagcttttctccccttgtcccttaattccactttctctttcttgtcccttaattccactttctctttccttctcccacctcccgtcctataatctcccacttaaggtagctgccttcatttcttagagggagctgcagaattattttataaaactaaagaaagaatttcaagggattctaggggtcattaggatcctcacagattatttttggttggggagttgaaactttttaaaggcatataattctagttacctgtgtctgttagctttgtgcatttattttttatttatccttcttttggcttttttttctttgtaccccttcttttcctccttgtttggtaggagcttcaaatattctttttttttctatactaaaggatttgtttccatttgtgtaattggctgtgtacttttcttttctaaaaaaagtttttggttagggatttggtttttggttttgtgtttgttttttctttcctctctcagaaaaaaaaatttcatgctttaaataaaatccaaagacacaccctttcactgctgatgcagaaaaaagggaaagggttcttgttacttgagaatttgtttctgatttaaacaaacaagacttagtttaataaaagaaagagaaaaacaaaagattcccaggttgttatgtgcttcttctgcaagcagagaggcaaatgttaatgacaattccatataccaaaagacacattttttacttcaaagttttgtccttgtgttaggcagtctgagcagcgagtgatccagagcgcagccaacaaagcagcagatagcagtgtacagaaagcaaaaaaggaactgtatgtgaggcacttgtttctgttaatatccatattcctgttaacacacaccctttctcatgtaaaaagaaaaataaataaatggtctgaactttgaaaactttgtgctgctaaaacatagattttggagacaaataaatagatgctttgctgtttcactttcatagctaaacatcaacagaaaccatctccccttgcccccaaagtgtgaaatccttcttcccttcgttttcttccttatgtttcaaaagggaactttgaagactgtgaatacaggttccattggtcacctttcgggcttctttccccagtgctgaagccactcatcgactttgcaaaagactggagcattccaagatctgaaaatggattttttttctttttttcttttttagccgggactattttatttttatgaatttgtttttagtttaatgaaatagtagatcctgaaatgttgtacatatttctaactaggctgatgcacagtgcaaattccttttttaattgttttttttaagtagaaatactaaagaaagaataccatctaactattcataccagtatccagttgtagcataaggtgtcaaaagcaagtacgcaaaacatttactgttttaacaagctatttccttttaacaagaaatcttgtatttcttcctgtgtttgagatgaacatttttaaattttaaagttgtacagttttttgttttccattattttatcttgtttgtaactctatgaaatatatatatatatattttttgccatttaactgttgtatgttactctgtgtctgtaccatatagaaaaaaaattgtttttgtttttggttctctatgtgatatcagttaacaatgtaacactagctttacctgtcaaattctgctaggtcttctctgaaaacgttgtttttaaaaatgatattgcttggtaatagtgcaatttctatccttttccctcccccctcaacttttaagttcttttctttataattttgctgccccctccctgatggtttgggtttttgtttttgtttttgtttttttttttcatggagctactatgccatcctccctctgtgaggcagagtgactgtcagtgttttgttatgccatgccttgagctgtgggtgtttggcgacaataaggtggttgaatagattggctgagcacacttccacccacctagtgttctcagaggggttatgtgattgtttcaacctggagtgggttgcacccttaatgctttcctctgcaactaaaccgcccacatatatgttcattgaaaaaagtaagaataattctcagcactaacccagaagtagcaaagcagtcagtgatggtgaacattagaggtcaaacatgagttagatgtttgtgggctgacagccatcgtggctatgaccagtactatttacaaagcatgaattcactacaatgctcaactgtttgtttagctttatctcacttggggaatttattcctgtctgctgcattgtaggtagctgggtaggatatatttccacttgctttttaaattagttcttcacctccattgacactcgttttttggttttctccctatagtgtgggttggtgctagacaccagtctgacccacagaatgggagttatttcatccatctttcctccatccttccaaaaaccacatatctacacaaggaaaaatttaatacatctaggaattttttttttaattacaagctatttaaagagatgaatgtggccaaagttttacacaattgaaaataaagtaaaacagacggcatgtgtttaaacctgagtttatcaggcatggcaggaagttgcaggagagagaggcagtgacccaagccagtgcacttgatgttcatggacatatattttttttaaataataaattaaaacattttaaatagaagcataaattgagttgtttgttggcgctgagatactgcccactgtgaaacaaagctttgactagttttttgtttgtttactttcttcaggggggaggggggcaagtttgggtaggaaagaaagcataaatgaacgtgaccctgaggtgaagaggtatatgaacagcctttgcaatgtacaaaaagaaaaaaaaacaaaaaacaacaaaaaaaatagagcaagtgaaaccaaaaatgatgttcttggtgtttttctataatgtagtcttgttagcttttttgttactgtaacaatgctgatctcgaactgtaccaaaatacatggagactaacaaacagaaccacatggaactttcaaactgaaaaaaaaatttgtcacaaaaactttgttgtcatagttaagttgattgtagatggtaattgaatatactcctttgaaaatatttcatcaagtatgtttcctgctcattgtgatacattaaaaaaaaaatatgagcaaaa

SEQ ID NO: 227 - DNA, 1559 bp, HOMO SAPIENS
ccccagtctgagaacaagaaagaagaacttctgtctcgagggtctcactgtcaaccaggccagagtgcagtgaagatcatacctcactacatccgtgaactcccgggctcctcccacctaagtctcttgagtagctgggacttcaggagactgaagccaaggataccagcagagccaacatttgcttcaagttcctgggcctgctgacagcgtgcaggatgctgttggaacccggcagaggctgctgtgccctggccatcctgctggcaattgtggacatccagtctggtggatgcattaacatcaccagctcagcttcccaggaaggaacgcgactaaacttaatctgtactgtatggcataagaaagaagaggctgaggggtttgtagtgtttttgtgcaaggacaggtctggagactgttctcctgagaccagtttaaaacagctgagacttaaaagggatcctgggatagatggtgttggtgaaatatcatctcagttgatgttcaccataagccaagtcacaccgttgcacagtgggacctaccagtgttgtgccagaagccagaagtcaggtatccgccttcagggccattttttctccattctattcacagagacagggaactacacagtgacgggattgaaacaaagacaacaccttgagttcagccataatgaaggcactctcagttcaggcttcctacaagaaaaggtctgggtaatgctggtcaccagccttgtggcccttcaagctttgtaagccttgtgccaaaagaaacttttaaaacagctacagcaagatgagtctgactatggcttagtatctttctcattacaataggcacagagaagaatgcaacagggcacaggggaagagatgctaaatataccaagaatctgtggaaatataagctggggcaaatcagtgtaatccttgactttgctcctcaccatcagggcaaacttgccttcttccctcctaagctccagtaaataaacagaacagctttcaccaaagtgggtagtatagtcctcaaatatcggataaatatatgcgtttttgtaccccagaaaaacttttcctccctcttcatcaacatagtaaaataagtcaaacaaaatgagaacaccaaattttgggggaataaatttttatttaacactgcaaaggaaagagagagaaaacaagcaaagataggtaggacagaaaggaagacagccagatccagtgattgacttggcatgaaaatgagaaaatgcagacagacctcaacattcaacaacatccatacagcactgctggaggaagaggaagatttgtgcagaccaagagcaccacagactacaactgcccagcttcatctaaatacttgttaacctctttggtcatttctctttttaaataaatgcccatagcagtatttggagtattttcttttctcctaaatccacaaactctcttctttctctttggacagatgacctcttgtcatagttaagcagagagtgggcaggatattcctgataggaggaactacatgaataaaggggtaag

SEQ ID NO: 228 - DNA, 1631 bp, HOMO SAPIENS
gaagttgaaggggcgcagcgataccggtgcgcggcgctggcgtcgggcgcgtgacgtctttcctgcgcgccacctagcgtctctatcgcgccagttcctcagcctcagtgctatgaaggtgacagcgtgaggtgacccatctggcccgccgcgatgctggcaacacggcggctgctcggctggtcgcttcccgcgcgggtatctgtgcgtttcagcggcgacacgacagcacccaagaaaacctcatttggctcgctgaaggatgaagaccggattttcaccaacctgtacggccgccatgactggaggctgaaaggttccctgagtcgaggtgactggtacaagacaaaggagatcctgctgaaggggcccgactggatcctgggcgagatcaagacatcgggtttgaggggccgtggaggcgctggcttccccactggcctcaagtggagcttcatgaataagccctcagatggcaggcccaagtatctggtggtgaacgcagacgagggggagccgggcacctgcaaggaccgggagatcttacgccatgatcctcacaagctgctggaaggctgcctggtggggggccgggccatgggcgcccgcgctgcctatatctacatccgaggggaattctacaatgaggcctccaatctgcaggtggccatccgagaggcctatgaggcaggtctgattggcaagaatgcttgtggctctggctatgattttgacgtgtttgtggtgcgcggggctggggcctacatctgtggagaggagacagcgctcatcgagtccattgagggcaagcagggcaagccccgcctgaagccccccttccccgcagacgtgggagtgtttggctgccccacaactgtggccaacgtggagacagtggcagtgtcccccacaatctgccgccgtggaggtacctggtttgctggctttggcagagaacgcaactcaggcaccaaactattcaacatctctggccatgtcaaccacccttgcactgtggaggaggagatgtctgtgcccttgaaagaactgattgagaagcatgctgggggtgtcacgggcggctgggacaacctccttgctgtgatccctggcggctcgtctaccccactgatccccaagtctgtgtgtgagacggtgctgatggacttcgatgcgctggtgcaggcacagacaggcctgggcacagctgcggtgatcgtcatggaccgctcgacggacatcgtgaaagccatcgcccgcctcattgagttctataagcacgagagctgtggccagtgtaccccatgccgtgagggtgtggactggatgaacaaggtgatggcacgtttcgtgaggggggatgcccggccggccgagatcgactccctgtgggagatcagcaagcagatagaaggccatacgatttgtgctctgggtgacggggccgcctggcctgtgcagggtctgatccgccactttcggccggagctcgaggagcggatgcagcggtttgcccagcagcatcaggcccggcaggctgcctcttagcccaccaccctggcctgctgtcctgcgtctatccatgtggaatgctggacaataaagcgagtgctgcccaccctccagctgcc

SEQ ID NO: 229 - DNA, 2175 bp, HOMO SAPIENS
agatgctcgcctccgcgcgtttccgcttccgccatcgcggacgcagcctcgtgccgggagtcgccgcattgtggtccgcttctctgcactatgtcgggtggcctcctgaaggcgctgcgcagcgactcctacgtggagctgagccagtaccgggaccagcacttccggggtgacaatgaagaacaagaaaaattactgaagaaaagctgtacgttatatgttggaaatctttctttttacacaactgaagaacaaatctatgaactcttcagcaaaagtggtgacataaagaaaatcattatgggtctggataaaatgaagaaaacagcatgtggattctgttttgtggaatattactcacgcgcagatgcggaaaacgccatgcggtacataaatgggacgcgtctggatgaccgaatcattcgcacagactgggacgcaggctttaaggagggcaggcaatacggccgtgggcgatctgggggccaggttcgggatgagtatcggcaggactacgatgctgggagaggaggctatggaaaactggcacagaaccagtgagtggtgagagctctgtcagtgacaaacactcctttggcctgttgaatttgctgaagaacatcacctaaagtctgcacacgagcccatttttaccaagatttgatcagtgtctttactgagctggaagcctctgaaagttattaaaggacagaatccaaaagaatgcctttaattcttgtctgagaatcttggccatgtgtcagattatcagaacaattttgttaccaggtcagaaattgtgttctttgacaacagattggatctgtaatgttgattagtctttagccataaccactacacttttagaaagacagaaaaatgtaagaatttgtttttaccataatgagtcttaagtaggttcatgatctacattggggcctgggattatttttttaattttaagtttgcatgagatagcctaataaatggaggtggggccaggcatggtggctcacacgtgtaatcccaacactttgggaggctgaggaggaaggatagcttgaggccaggagtttgagactagactgggcaacatagcaagaccccgtctctacaaagcacaacgaaaaacaacaaatggagttgtgctatgttgtattgctttgcacaaaattaggaacaggtgtttgacaattgaatttgttttctgtgaattctaacctctaaaggcatgcttagaggtcaaggaccttcctgtgtagttggtgcaaaagcaatctccacaggacagcactgcttccatgcttcatacatcaggaaatgaggccagaacttgagtatttactaacacgtttttcaaaagatgtcagtgttatacctaaagctaaaaaaaagcaagggtttgtcatagagggaacctctaaataatttcaggggtaggggagatgttgtcaataggaaatgggataaaatatcaagagacaatgaaaacactgccttgacatgaggaccagcaagtttattcttttcattttcagtgatgttgggaatggactgggttttaaaagggagcttgaagagggaatgtttgacagtcacagaaggttcctgcagcagatgcctcttttagccatttctcatttttttcctcaaattttacctactgaggctcaagccttcacagtgagctgatggtctctacagggaggggagtctagggaatttatttggtatttgtaaggcaagaggtgatttctctctaatatatctgagttattgctcatttaaaactgttaagtccagtataattttccctgatatgaaaaaatgtgcatttttttcacttagcaacaaagtaccttctaatttccaatagtccgtgaaagttggggctgaagtacctaagtgtgaatgtctctcccgttaaactgagtgtagaaatctgaatttttaaaagagctgtaactagttgtaagtgcttaggaagaaactttgcaaacatttaatgaggatacactgttcatttttaaaattccttcacactgtaatttaatgtgttttatattcttttgtagtaaaacaacataactcagatttctacaggagacagtggttttatttggattgtcttctgtaataggtttcaataaagctggatgaacttatcgttaaaaa

SEQ ID NO: 230 - DNA, 2418 bp, HOMO SAPIENS
gaggcggggccaggcctggtctctgataacgggatgggtggtgctggacctcgggcggggccgggcctcgtggcgggaggaggcagggcagggcctctgggacggggctggacggcttgttgacggaaacgagcccttgacgctgtggcccggaagtggagcggctgtcgcagtgcggctccggcagtggcagcggaggcctgtgtttgcggccttcggcaagcgactgagatggcgagcgcaactgcacctgcagccgcagtccccaccctggcttcgcctttggagcagctccggcacttggcggaggagctgcggttgctcctgcctcgagtgcgggtcggcgaagcccaggagaccaccgaggagtttaatcgagagatgttctggagaagactcaatgaggcagctgtgactgtgtcaagggaagccacgactctgaccatagtcttctctcagcttccactgccgtctccacaggaaacccagaagttctgtgaacaagtccatgctgccatcaaggcatttattgcagtgtactatttgcttccaaaggatcaggccctgagaacaatgaccttatttcctacaacagtgtctgggttgcgtgccagcagatgcctcagataccaagagataacaaagctgcagctcttttgatgctgaccaagaatgtggattttgtgaaggatgcacatgaagaaatggagcaggctgtggaagaatgtgacccttactctggcctcttgaatgatactgaggagaacaactctgacaaccacaatcatgaggatgatgtgttggggtttcccagcaatcaggacttgtattggtcagaggacgatcaagagctcataatcccatgccttgcgctggtgagagcatccaaagcctgcctgaagaaaattcggatgttagtggcagagaatgggaagaaggatcaggtggcacagctggatgacattgtggatatttctgatgaaatcagccctagtgtggatgatttggctctgagcatatatccacctatgtgtcacctgaccgtgcgaatcaattctgcgaaacttgtatctgttttaaagaaggcacttgaaattacaaaagcaagtcatgtgacccctcagccagaagatagttggatccctttacttattaatgccattgatcattgcatgaatagaatcaaggagctcactcagagtgaacttgaattatgacttttcaggctcatttgtactctcttcccctctcatcgtcatggtcaggctctgatacctgcttttaaaatggagctagaatgcttgctggattgaaagggagtgcctatctatatttagcaagagacactattaccaaagattgttggttaggccagattgacacctatttataaaccatatgcgtatatttttctgtgctatatatgaaaaataattgcatgatttctcattcctgagtcatttctcagagattcctaggaaagctgccttattctctttttgcagtaaagtatgttgttttcattgtaaagatgttgatggtctcaataaaatgctaacttgccagtgattaaatgagtgcccttccaaagtttctttttaccagaaatacagtggattgagactagaacattgctttcatttgggtttgtaggtttaaaaatctgattctaatcagaagtatatttagaacaaaacactttatttataaaagatgactccaaaattcatcttagtatttcaccatgttatatattattatcagcaagtccttctgaatattatcacagattactccatgtctctaaaatatattggcattgagctcatttgttaggtttgcccaccttattgaacagatttattttccttatacatacttgtgttgtccttggttacgtgtgtccccaaatgtaaataccaaatttttataaatcaaaaattttttagtgtgtaagagattttatgtaattttaagggccttttcagttcatccttttgcaaaaccatcaccacttaattatacttttgcatcagtctagaagactgcatattggaaagcagtgtaaatctataatgatgtatattctggtgagctgaatagggcattatgcatgtcctacaggtctccgccacctctcatgcccatcatcttccttttgtaggtgtaattcataacatatgcctttctgctgtctttaggtataatcagcaacagcagtcattctttgagtgactaatgtatacttggggttggggttgaaattccttaagccaaatgagttttagcttactgttttgaagtgccattttgtattgttaacaagtgtcatgaagggaaggaactaaaatcaaactgacagagtgtcaaggcaacaaaataacataaacaaaataataacattgtaaaaaaaaaaaa

SEQ ID NO: 231 - DNA, 1758 bp, HOMO SAPIENS
ggccaagtgcggggacgccgggggggccttcacgggaggcccgggctcttccgggcgtcgcggagccggagggtgcaggcgacgggaagcgcgggtggtcggctggggtccggctcctggagaacatggcccggcctcccgggggctctggtcccctcctcgattcagagcattcttcactccagaataatgagcaaccctctttggccaccagctccaatcagactagcatgcaggatgaacaaccaagtgattcattccaaggacaggcagcccagtctggtgtttggaatgacgacagtatgttagggcctagtcaaaattttgaagctgagtcaattcaagataatgcgcatatggcagagggcacaggtttctatccctcagaacccatgctctgtagtgaatcggtggaagggcaagtgccacattcattagagaccttgtatcaatcagctgactgttctgatgccaatgatgccttgatagtgttgatacatcttctcatgttggagtcaggttacatacctcagggcaccgaagccaaagcactgtccatgccggagaagtggaagttgagcggggtgtataagctgcagtacatgcatcctctctgcgagggcagctccgctactctcacctgtgtgcctttgggaaacctgattgttgtaaatgctacactaaaaatcaacaatgagattagaagtgtgaaaagattgcagctgctaccagaatcttttatttgcaaagagaaactaggggaaaatgtagccaacatatacaaagatcttcagaaactctctcgcctctttaaagaccagctggtgtatcctcttctggcttttacccgacaagcactgaacctaccagatgtatttgggttggtcgtcctcccattggaactgaaactacggatcttccgacttctggatgttcgttccgtcttgtctttgtctgcggtttgtcgtgacctctttactgcttcaaatgacccactcctgtggaggtttttatatctgcgtgattttcgagacaatactgtcagagttcaagacacagattggaaagaactgtacaggaagaggcacatacaaagaaaagaatccccgaaagggcggtttgtgatgctcctgccatcgtcaactcacaccattccattctatcccaaccccttgcaccctaggccatttcctagctcccgccttcctccaggaattatcgggggtgaatatgaccaaagaccaacacttccctatgttggagacccaatcagttcactcattcctggtcctggggagacgcccagccagtttcctccactgagaccacgctttgatccagttggcccacttccaggacctaaccccatcttgccagggcgaggcggccccaatgacagatttccctttagacccagcaggggtcggccaactgatggccggctgtcattcatgtgattgatttgtaatttcatttctggagctccatttgtttttgtttctaaactacagatgtcaactccttggggtgctgatctcgagtgttattttctgattgtggtgttgagagttgcactcccagaaaccttttaagagatacatttatagccctaggggtggtatgacccaaaggttcctctgtgacaaggttggccttgggaatagttggctgccaatctccctgctcttggttctcctctagattgaagtttgttttctgatgctgttcttaccagattaaaaaaaagtgtaaattaca

SEQ ID NO: 232 - DNA, 5061 bp, HOMO SAPIENS
ggtctgcagcgcaagcgcagtgcggataaacaggaagcgggcggtggaggcagcagcagagggagagctcggggcttggaggggaaacagcggaagacctaagattatcgggagggcagcagaggcagagaacgaggacaggacccttggccgtcttcttccagggaacgagaggtcacagcctcgctctccgcttaggcttctggcgccccagcttaaagccgaggctgcggctgacaaagggctcgcgccggtgccgccgcccttctcatccgggcattcgggtccctgcggagagggagggggaagggcagagggggaggggaaggagccggaggggcgcacacttggagctgaagccctctccagggctccgggccggtgccccaacggacagaggtcgaggaggacccgcagaggtggcagcggccgggggcaggaggatggtgcagaaggagagtcaagcgacgttggaggagcgggagagcgagctcagctccaaccctgccgcctctgcgggggcatcgctggagccgccggcagctccggcacccggagaagacaaccccgccggggctgggggagcggcggtggccggggctgcaggaggggctcggcggttcctctgcggtgtggtggaaggattttatggaagaccttgggttatggaacagagaaaagaactctttagaaggctccagaaatgggaattaaatacatacttgtatgccccaaaagatgactacaaacataggatgttttggcgagagatgtattcagtggaggaagctgagcaacttatgactctcatctctgctgcacgagaatatgagatagagttcatctatgcgatctcacctggattggatatcactttttctaaccccaaggaagtatccacattgaaacgtaaattggaccaggtttctcagtttgggtgcagatcatttgctttgctttttgatgatatagaccataatatgtgtgcagcagacaaagaggtattcagttcttttgctcatgcccaagtctccatcacaaatgaaatctatcagtacctaggagagccagaaactttcctcttctgtcccacagaatactgtggcactttctgttatccaaatgtgtctcagtctccatatttaaggactgtgggtgaaaagcttctacctggaattgaagtgctttggacaggtcccaaagttgtttctaaagaaattccagtagagtccatcgaagaggtttctaagattattaagagagctccagtaatctgggataacattcatgctaatgattatgatcagaagagactgtttctgggcccgtacaaaggaagatccacagaactcatcccacggttaaaaggagtcctcactaatccaaattgtgaatttgaagccaactacgttgctatccacacccttgccacctggtacaaatcaaacatgaatggagtgagaaaagatgtagtgatgagtaggcaagttgcacacagtggagctaaagcaagtgtagttgatgggactcctttagttgcagcaccctctttaaatgccacaaccgtagtaacaacagtttatcaggagcccattatgagccagggagcagccttgagtggtgagcctactactctgaccaaggaagaagaaaagaaacagcctgatgaagaacccatggacatggtggtggaaaaacaagaagaaacggaccacaagaatgacaatcaaatactgagtgaaattgttgaagcgaaaatggcagaggaattgaaaccaatggacactgataaagagagcatagctgaatcaaaatccccagagatgtccatgcaagaagattgtattagtgacattgcccccatgcaaactgatgaacagacaaacaaggagcagtttgtgccaggtccaaatgaaaagcctttgtacactgcggaaccagtgaccctggaggatttgcagttacttgctgatctattctaccttccttacgagcatggacccaaaggagcacagatgttacgggaatttcaatggcttcgagcaaatagtagtgttgtcagtgtcaattgcaaaggaaaagactctgaaaaaattgaagaatggcggtcacgagcagccaagtttgaagagatgtgtggactagtgatgggaatgttcactcggctctccaattgtgccaacaggacaattctttatgacatgtactcctatgtttgggatatcaagagtataatgtctatggtgaagtcttttgtacagtggttagggtgtcgtagtcattcttcagcacaattcttaattggagaccaagaaccctgggcctttagaggtggtctagcaggagagttccagcgtttgctgccaattgatggggcaaatgatctcttttttcagccacctccactgactcctacctccaaagtttatactatcagaccttattttcctaaggatgaggcatccgtgtacaagatttgcagagaaatgtatgacgatggagtgggtttaccctttcaaagtcagcctgatcttattggagacaagttagtaggagggctgctttccctcagcctggattactgctttgtcctagaagatgaagatggcatatgtggttatgccttgggcactgtagatgtgaccccctttattaaaaaatgtaaaatttcctggatccccttcatgcaggagaagtataccaagccaaatggtgacaaggaactctctgaggctgagaaaataatgttgagtttccatgaagaacaggaagtactgccagaaactttccttgctaatttcccttctctgataaagatggacattcacaaaaaagtaactgacccaagtgtggccaaaagcatgatggcttgcctcctgtcttcactgaaggctaatggctcccggggagctttctgtgaagtgagaccagatgataaaagaattctggaattttacagcaagttaggatgttttgaaattgcaaaaatggaaggatttccaaaggatgtggttatacttggtcggagcctgtgacatttgttgacactgtgaactgtccaaaagtctcttaactgcaccttgtgaatggtagttgaggtcttcatacagttcagcctctagaatggtaacaaatcagccaattggattcgaaacaaagaagactatgtaaaactcacccatcacactttgagactactcactggttggaagaatatagtattgcagcaaatcctgtatgaaagagagatgtgggcttcctttttgagtcttgtgttaggtgctgagaccttttacatgggcttatacagggagagagtcttcaataaatgtagtcagcactattttctgcatccagtgtggttgcgtttctcacctgagagtaatcaagataacatctgtcatcttccttggtttattgagtgaaatgcctctcagtcttaggggacatggcagagatgaaagaaagaaagagtgggtttcagaagtgtcagggtggagtgattccaagtgggatggttgtggcattagtttaagctgaataaataatttcaatttggggcagttattctgctttttgtaaagccgtggccaattgtctcctgtaatgactgttggttcaggcatgttgtactttgtagggacaaatgtgcatttgtttgtggcaaaagcctacaattgacaaacttgtaaatttctttgtatataaactagctgtaacctgactatcctttgtgtttactgtttttgtaaatttttttcctctataaatgaaagggtgttggttcagaatggcactttgaataatgtaaaccagtgaaaagtggattttctttacttttgtctttgggtttggggttgtttttgttctttttgaagttttattatttttaaagtgcctcccacctaggcgtaggccatgaccatttggggtacgagagcctaattttgtaggacttaatctgttgaaaagtgcagttacttctggaaattaacctcaatattaggtcagcatgtgaaatgttggatttgacatgtcaggtagggttcagggactgattggtcccatttgccctcaggtcagttgtttaatctcaagacctgttactactgattttattaaatcagagtctttaattcttgcatgtttgtatctaatttctgaacgaatgagcacactttaaccagttatttacagttacctttttcctttaaccggattgtgaaagcttcatgtattttaatttagattctgtgtttttaagggttctgagcatgaagctggcagatagtcggcaggactcattttttcatcatggctggctgatttctccatagattgataacagtattttgttatcttgcttctctgtagttttgcatcagctgtttaactttgagctgagtgaggggagaggggtaaagagaaagaaacttaagttttctttcacagaactccaccattgtgggctttgagagagccctaaagcattgtacctagtggtacctagtgacttccaaccaaagcctttgagtatgcactaaataggtgagaagaaaggagagaaggtttttaggttagaaacctttaaccgatagaaggatatggtatgttgtaaagctggaaccaagtttgcatttttgagggcttgagatgaagggaagactcttaccagatagtaagacagctgagttttcctcagttttctcgtcttaacactagtggacaattctagcattttgtttggaggatttcagagttaacctcatggaattcaggattttttagcaagtttgcttttggttttatcttggcttttagtaatcatgttggctggtctggtcacaggtgactgtgaaacagatgccctggtcttgctttcatcactctaggatcatgaagtgctatgctatttcctggttatgaatattaaggttggaattacatttttattgattgtttggatcagagctcagttcctgtagaaaacgaactgtaaaagaccatgcaagaggcaaaataaaacttgaagtgaatgcttgtaaaaaaaaaaaaaaaaaa

SEQ ID NO: 233 - DNA, 1678 bp, HOMO SAPIENS
gatactggccggcatcagtggactgtcggcaggtccttgagcaactggtgtgtgaaatgggacggacgtcaaaggacaagcgggatgtctactaccgcctggccaaggagaatggctggcgtgctcgcagcgccttcaaactgctacaactggataaggaattccaactcttccaaggcgtgacacgggcagttgacctgtgtgcagccccaggcagctggagccaggtgctgagccagaagatcgggggccaagggtccggccacgtggtggctgtggacctgcaggctatggctccactaccaggtgtggtacagatccagggggacatcacccagctgtccactgccaaggagatcatccagcactttaagggctgccctgcggacctagtggtgtgtgacggggctcctgatgtaaccggtctccatgatgttgatgagtatatgcaggcccagctcctcctagctgctctgaacattgctacacatgtcctgaagccagggggctgctttgtggccaagatattccgaggccgggatgtgacgctcctctacagccagctgcaggtcttcttctccagcgtgctgtgtgccaagcccaggagcagccggaactctagcatcgaggccttcgctgtctgtcagggctatgaccctcccgagggcttcatcccggacctgagcaaacccctgctggaccattcttacgatttcaaccagctggatggtcccacccgcatcattgtgccttttgtgacctgtggggacctgagctcctatgattcggaccgcagttacccactggacctagagggcggctcagagtacaagtacactccacccacacagccccccatctcgccaccataccaggaggcctgcacgttgaagaggaaggggcagctggccaaggagatccgcccccaggactgccccatcagcagagtggacacgtttccccagcccctggccgcccctcagtgccacaccctgctggcccctgagatggaagacaatgaaatgagttgttcaccttaacccattacgctggcaaactgatacaactcagaaactgctcaatgtcaggaaaaccggaacttgttgatgaacttgttttcaaaatatcatctcatcaacgaggcctggacaaacaagccctgaggagggatctgcaacaaccctgaagacaacaaggaaagaaaccatgaaagtctgtctgtactgcagtgggaattcttgagtgaggtcttacctcttctttaaacctcttcaggagtgtcctgattatgtccagaattttccctaaaggcagggattcttaacctggatagaagccaggggtaaccatgaacttgatggaagaaaatgttacatctttattttcagcaatgaaactgaaatttagccttactcccaagttataaatgctggcaacaaatcacagtagtaaaagcagtacctgggattttcccaccaatacaaaccagttacagcaactgtaatgtaacataaaaagggcatcttgaagtattgttcatatttgtcacctcttggaatgatagcagatcctgtaagttgatgtattaattaaaaagcccatatattactgcatctcaattttgtttcaatttaatatatagtaataattgtaattcaatgtaattggcttccattgt

SEQ ID NO: 234 - DNA, 1776 bp, HOMO SAPIENS
attggccgagcgcggccgttgggggtgaggccgcgtcgggggaggacaacaaagggccgcgggcggcgggcagtggtgtcccagtctcccggtgcttccctgaggctgaggcgcccggcctcccgcccgccgcgctccagatgaagtgtgagcactgcacgcgcaaggaatgtagtaagaaaacaaaaactgatgaccaagagaatgtgtcagccgatgcaccgagtccagcccaggaaaatggagagaagggagaattccacaagttggctgatgccaagatatttttgagcgactgcctggcatgtgacagctgtatgactgcagaggaaggagtccaactttcccagcaaaatgccaaggacttcttccgcgttctgaaccttaacaagaaatgtgatacctcaaagcacaaagtgctggtagtgtctgtgtgtcctcaatctttgccttattttgctgctaaattcaacctcagtgtaactgatgcatccagaagactctgtggtttcctcaaaagtcttggggtgcactatgtatttgatacgacgatagctgcggattttagtatcctggagagtcaaaaagaattcgtgcgtcgctatcgccagcacagtgaggaggaacgcaccctgcccatgctgacctctgcctgtcctggctgggtccgatacgccgagcgggtgctgggtcgccccatcactgcccacctctgcaccgccaagtccccccagcaggtcatgggctctttggtgaaggattatttcgccagacagcagaacctgtctccagagaagattttccacgtcattgtggccccttgttatgacaagaagctggaggctcttcaggaaagccttccccctgctttgcatggctcccggggcgctgactgcgtgttaacatcagaaattagccaggcgtggtggtgcacacctgtgatcacagctactcgggaggctgcggcaagagaatcacttgaacccgggaggcagaggttacagcgagacaagattgcaccactggactccagcctgggcggcggaggtgaaattgctcaaataatggagcaaggtgacctctcagtgagagatgctgccgtcgacactctgtttggagacttgaaggaggacaaagtgacgcgtcatgatggagccagctcagacgggcacctggcacacatcttcagacatgcggccaaggagctgttcaacgaggatgtggaggaggtcacttaccgagccctgagaaacaaagacttccaagaggtcacccttgagaagaacggagaggtggtgttacgctttgctgcagcctatggctttcgaaacatccagaacatgatcctgaagcttaagaagggcaagttcccattccactttgtggaggtcctcgcctgtgctggaggatgcttaaatggcagaggccaagcccagactccagacggacatgcggataaggccctgctgcggcagatggaaggcatttacgctgacatccctgtgcggcgtccggagtccagtgcacacgtgcaggagctgtaccaggagtggctggaggggatcaactcccccaaggcccgagaggtgctgcataccacgtaccagagccaggagcgtggcacacacagcctggacatcaagtggtgaagtcaggccagggccttccagctgctcttggggccagagccaagagcctctcagtagagggaggggctgccctgagtggagtattaaagacacttaagaaaaccgctcaaaaaaaaaaaaaaaaaaa

SEQ ID NO: 235 - DNA, 3120 bp, HOMO SAPIENS
gggcggggcgtgtgcggactgagcgctctgcttccggggcgcgggtgacgcgacgacggcgacactttgctacggagtgcatcggacgtcgaagcctagagtctctgcgtctttccctcttccgctgcctcattcctttccttcctagccttggtcgtcgccgccaccatgaacaagaagaagaaaccgttcctagggatgcccgcgcccctcggctacgtgccggggctgggccggggcgccactggcttcaccacgcggtcagacattgggcccgcccgtgatgcaaatgaccctgtggatgatcgccatgcacccccaggcaagagaaccgttggggaccagatgaagaaaaatcaggctgctgacgatgacgacgaggatctaaatgacaccaattacgatgagtttaatggctatgctgggagcctcttctcaagtggaccctacgagaaagatgatgaggaagcagatgctatctatgcagccctggataaaaggatggatgaaagaagaaaagaaagacgggagcaaagggagaaagaagaaatagagaaatatcgtatggaacgccccaaaatccaacagcagttctcagacctcaagaggaagttggcagaagtcacagaagaagagtggctgagcatccccgaggttggcgatgccagaaataaacgtcagcggaacccacgctatgagaagctgacccctgttcctgacagtttctttgccaaacatttacagaccggagagaaccatacctcagtggatccccgacaaactcaatttggaggtcttaacacaccctatccaggtggactaaacactccatacccaggtggaatgacgccaggactgatgacacctggcacaggtgagctggacatgaggaagattggccaagcgaggaacactctgatggacatgaggctgagccaggtgtctgactccgtgagtggacagaccgtcgttgaccccaaaggctacctgacggatttaaattccatgatcccgacacacggaggagacatcaatgatatcaagaaggcgcgactgctcctcaagtctgttcgggagacgaaccctcatcacccgccagcctggattgcatcagcccgcctggaagaagtcactgggaagctacaagtagctcggaaccttatcatgaaggggacggagatgtgccccaagagtgaagatgtctggctggaagcagccaggttgcagcctggggacacagccaaggccgtggtagcccaagctgtccgtcatctcccacagtctgtcaggatttacatcagagccgcagagctggaaacggacattcgtgcaaagaagcgggttcttcggaaagccctcgagcatgttccaaactcggttcgcttgtggaaagcagccgttgagctggaagaacctgaagatgctagaatcatgctgagccgagctgtggagtgctgccccaccagcgtggagctctggcttgctctggcaaggctggagacctatgaaaatgcccgcaaggtcttgaacaaggcgcgggagaacattcctacagaccgacatatctggatcacggctgctaagctggaggaagccaatgggaacacgcagatggtggagaagatcatcgaccgagccatcacctcgctgcgggccaacggtgtggagatcaaccgtgagcagtggatccaggatgccgaggaatgtgacagggctgggagtgtggccacctgccaggccgtcatgcgtgccgtgattgggattgggattgaggaggaagatcggaagcatacctggatggaggatgctgacagttgtgtagcccacaatgccctggagtgtgcacgagccatctacgcctacgccctgcaggtgttccccagcaagaagagtgtgtggctgcgcgccgcgtacttcgagaagaaccatggcactcgggagtccctggaagcactcctgcagagggctgtggcccactgccccaaagcagaggtgctgtggctcatgggcgccaagtccaagtggctggcaggggatgtgcctgcagcaaggagcatcctggccctggccttccaggccaaccccaacagtgaggagatctggctggcagccgtgaagctggagtccgagaatgatgagtacgagcgggcccggaggctgctggccaaggcgcggagcagtgcccccaccgcccgggtgttcatgaagtctgtgaagctggagtgggtgcaagacaacatcagggcagcccaagatctgtgcgaggaggccctgcggcactatgaggacttccccaagctgtggatgatgaaggggcagatcgaggagcagaaggagatgatggagaaggcgcgggaagcctataaccaggggttgaagaagtgtccccactccacacccctgtggcttttgctctctcggctggaggagaagattgggcagcttactcgagcacgggccattttggaaaagtctcgtctgaagaacccaaagaaccctgggctgtggttggagtccgtgcggctggagtaccgtgcggggctgaagaacatcgcaaatacactcatggccaaggcgctgcaggagtgccccaactccggtatcctgtggtctgaggccatcttcctcgaggcaaggccccagaggaggaccaagagcgtggatgccctgaagaagtgtgagcatgacccccatgtgctcctggccgtggccaagctgttttggagtcagcggaagatcaccaaggccagggagtggttccaccgcactgtgaagattgactcggacctgggggatgcctgggccttcttctacaagtttgagctgcagcatggcactgaggagcagcaggaggaggtgaggaagcgctgtgagagtgcagagcctcggcatggggagctgtggtgcgccgtgtccaaggacatcgccaactggcagaagaagatcggggacatccttaggctggtggccggccgcatcaagaacaccttctgattgagcggttgccatggccggtctccgtggggcagggttgggccgcatgtggaagggctctgagctgtgtcctccttcattaaaagtttttatgtctcgtgtcagaaaaaaaaaaaaaaaaaaaaa

SEQ ID NO: 236 - DNA, 2702 bp, HOMO SAPIENS
attggctctgctggtaagtggtctattcctgcccacccccgggtgactagcttggccagtagtcgaccccacccggggaccgactctgggggttggagagactcttggggccggggtcgggcactccagctttcttctagccccgagctgggattccctggcctgcgccagctgcgtacacggcgagtacaccgcacctgcccgggacttcacccgcagctgcgagactcctccattcccggagggctccccacacctgctgcggccgtgccccatctccccgcagctgcggcgctgagcacccccatgtcgagaggctgagaccaggacagcagccctgaccaacgctccaataggccgggatccagccatacttcaatggatcccaggggtatcttgaaggcatttcccaagcggcagaaaattcatgctgatgcatcatcaaaagtacttgcaaagattcctaggagggaagagggagaagaagcagaagagtggctgagctcccttcgggcccatgttgtgcgcactggcattggacgagcccgggcagaactctttgagaagcagattgttcagcatggcggccagctatgccctgcccagggcccaggtgtcactcacattgtggtggatgaaggcatggactatgagcgagccctccgccttctcagactaccccagctgcccccgggtgctcagctggtgaagtcagcctggctgagcttgtgccttcaggagaggaggctggtggatgtagctggattcagcatcttcatccccagtaggtacttggaccatccacagcccagcaaggcagagcaggatgcttctattcctcctggcacccatgaggccctgcttcagacagccctttctcctcctcctcctcccaccaggcctgtgtctcctccccaaaaggcaaaagaggcaccaaacacccaagcccagcccatctctgatgatgaagccagtgatggggaagaaacccaggttagtgcagctgatctggaagccctcatcagtggccactaccccacctcccttgagggagattgtgagcctagcccagcccctgctgtcctggataagtgggtctgtgcacagccctcaagccagaaggcgaccaatcacaacctccatatcacagagaagctggaagttctggccaaagcctacagtgttcagggagacaagtggagggccctgggctatgccaaggccatcaatgccctcaagagcttccataagcctgtcacctcgtaccaggaggcctgcagtatccctgggattgggaagcggatggctgagaaaatcatagagatcctggagagcgggcatttgcggaagctggaccatatcagtgagagcgtgcctgtcttggagctcttctccaacatctggggagctgggaccaagactgcccagatgtggtaccaacagggcttccgaagtctggaagacatccgcagccaggcctccctgacaacccagcaggccatcggcctgaagcattacagtgacttcctggaacgtatgcccagggaggaggctacagagattgagcagacagtccagaaagcagcccaggcctttaactctgggctgctgtgtgtggcatgtggttcataccgacggggaaaggcgacctgtggtgatgtcgacgtgctcatcactcacccagatggccggtcccaccggggtatcttcagccgcctccttgacagtcttcggcaggaagggttcctcacagatgacttggtgagccaagaggagaatggtcagcaacagaagtacttgggggtgtgccggctcccagggccagggcggcggcaccggcgcctggacatcatcgtggtgccctatagcgagtttgcctgtgccctgctctacttcaccggctctgcacacttcaaccgctccatgcgagccctggccaaaaccaagggcatgagtctgtcagaacatgccctcagcactgctgtggtccggaacacccatggctgcaaggtggggcctggccgagtgctgcccactcccactgagaaggatgtcttcaggctcttaggcctcccctaccgagaacctgctgagcgggactggtgacccatggctgggggtgctgaggagagccgagttggactggctacccctcctggccacccagtactccctccagcctcagctggctgaacctcgccgctccaaccaccagcttcctcagcgagcagggcccagggctctgggcctgaagcaagagccagcccggctcccagtgtctgcccggctcccagtgtctgcccagccctctcccagacaggagcaggctgccaccccttctacctcaccactgcccctcgaagaattttgcaaatggccccttgccccattttaagcaggagcaggtggctggtttgaagccccaggtatcccccttccctgctatgggaaaggccaagctgctgggtggggacagaagctgcaggggagagggaagcagccgtgctgtcaacatcatccggcaccctctggggtaggagaacagccattccacatgtgttccctctatccgtcctgcttcctgggcagctggtggtgctgggaatggggtgccccagccttggtgaggacagtgttgggaggcccaggggcccagtaaagtgcatttgacattgaaaaaaaaaaaaaaaaaaaaaaaaaaa

SEQ ID NO: 237 - DNA, 2622 bp, HOMO SAPIENS
gaggcggagcctgggcttgggggcggggcggggcctgcgcctaggggggcggggcggggcggcgctctaggccgagcgggaggtcggggctgcgggcgctcgctggtggcggacccggaggctgctgcggcgccggggctccgtggcctggattgaatccgatcgggagccatgagcgtggacaaagctgagctatgcgggtctctgctcacctggttacagacgttccacgttccgtctccctgtgccagccctcaggacctgagcagcggccttgccgtagcctatgtgctgaaccagatagacccctcctggttcaacgaggcatggctccagggcatctcggaagatccaggtcccaactggaagctgaaggtcagcaatctgaagatggtcttacggagcctagtagagtactcccaggatgtcctggcgcatcctgtgtcagaagagcatctcccagatgtgagcctcattggagagttctcagacccggcagagctcggcaagctgcttcagctggtgctgggctgtgccatcagttgcgagaaaaagcaggaccacatccagagaatcatgacgctggaagaatcggttcagcatgtggtgatggaagccatccaagagctcatgaccaaagacactcctgactccctgtcaccagagacgtatggcaactttgacagccagtcccgcaggtactatttcctaagtgaggaggctgaggagggggacgaattacagcagcgctgtctggatctggagcggcagctgatgctcctgtcagaggagaagcagagcctggcgcaagagaatgcagggctgcgggagcggatgggccggcctgaaggcgagggtaccccaggtctcactgccaagaagctgctgctgctgcaatcccagctggagcagttgcaggaggagaacttcaggctggagagtggcagggaggatgagcgcctgcgctgtgccgagctggagagggaggttgcggagctgcagcaccggaaccaggcgctgactagcctggcccaggaggcacaggccctgaaggatgagatggatgaactacggcagtcttcggagcgtgctgggcagctggaggccacgctgaccagttgccggcgccgcttgggcgagctgagggagctgcggcggcaggtgcggcagctggaggaacgcaacgccggccacgccgagcgcacgcgacaactggaggatgagctacgccgagcgggctccctgcgcgcccagctggaggcgcagcggcggcaggtgcaggaactgcagggccagcggcaggaggaggccatgaaggccgagaaatggctatttgaatgccgcaacctggaggaaaagtatgagtcggtgacaaaggagaaggagcggctgttggcggagcgggactccttgcgggaggccaatgaggagctgcgctgcgcccagctgcagccgcgggggttgacccaggccgatccctcactggatcccacctccacacccgtggataacttagccgcagagatcctgcctgcggagctcagggagacgctcctgcggcttcagctggagaacaagcggctgtgcaggcaggaggcggccgaccgggagcggcaggaggagctgcagcgccacctggaggatgccaaccgcgcgcgccacgggttggagacgcagcaccggctgaaccagcagcagctatccgagctgcgggcccaggtggaggacctgcagaaagccctgcaggagcaggggggcaagactgaagattccattttgctgaaaaggaagctggaggaacatttgcagaagcttcatgaggcagatctggagttgcagaggaagcgggagtacattgaggagctggagccacccactgacagcagcacagcccggcggatcgaggagctgcagcataacttgcagaagaaggacgcggacttgcgggccatggaggagcgataccgccgctacgtggacaaggcccgcatggtcatgcagaccatggaacccaagcagcggccagctgcgggggcacctccagaactccattccctgaggacacagctccgagaacgggatgtccgcatccgacacctggagatggactttgagaaaagccgaagtcagcgggagcaggaagaaaagctgctcatcagtgcctggtataatatgggcatggccttgcagcagcgagctggggaggagcgggcgcctgcccatgcccagtcattcctggcacagcagcggctggcaaccaattctcgccgtggacccttgggacgcctggcatctctgaaccttcgccccactgacaagcactgacagacctcacaatcaagccagcctgggctccacccaccctggcttcctccagctcacatggcgcccagcactgggcttcagccaggtgctcgagagctttgaggccatgatctctgctcttccctctcccagattggtggggagggagggcgggaggtagatataggcctgttctttttagcaatgtgattcttgttgttgattctctctctggagttcatgtgctgcctcaggagactctgattttatatttgagaaaaataaaggcgttcaatctgcaaaaaaaaaaaaaaaaaa

SEQ ID NO: 238 - DNA, 9428 bp, HOMO SAPIENS
acaccaacctttacgtgaagtggaggcccaaggacagtgaggagctgggtggtcccagcctggagctgtgccagcctgacatgggaatctttcctttccggtgaccagggccctgcagatgtcgccaggaaagtggtgatccaggcaggaccaggctgcactgaagggacagagaaatggaggcaaacgaccattttaactttactggccttccccctgcacctgctgcctcaggactgaaaccctctccttcctcaggggagggcctctacactaacgggtctcccatgaacttcccccagcaagggaaaagtttgaatggggatgtgaatgttaatggcttatctactgtatctcacactactacttcagggattttgaactctgctccccactcctccagcacctcacacctccatcaccccagcgtggcctacgactgtctctggaactactcacagtacccatctgccaatcctggcagcaacctcaaggacccaccccttctctcccagttctcggggggacaatacccactcaacggcatccttgggggcagccggcaaccttcatccccaagtcataacactaaccttcgggctgggagccaagagttctgggccaacggtacccagagtcccatggggcttaactttgattcacaagaactgtatgattcctttcctgaccagaattttgaggaggtaggcagtggtatccatcctgatgaggcagcagaaaaggagatgacttcagttgtggcagagaatggcactggcttggtaggcagcttggagctggaagaagagcagccagaactgaagatgtgtggctacaatggctctgtcccttctgtggaatcgttacaccaagaggtctcagtcctggtccctgaccccacagtgagctgtttagatgatccttcacatcttcctgatcaactggaagacactccaatcctcagtgaagactctctggagcccttcaactctctggcaccagagccagtgagtggaggactatatggtattgatgacacggagctgatgggtgcagaggacaagctgcctcttgaggacagccctgtgatttctgcccttgattgcccttccctcaataatgctactgccttcagtctcctggcagatgatagtcaaacatcaacctctatctttgccagtcccacctctccacctgtcctaggggagtctgtcctgcaagataacagctttgacctgaataatggtagtgacgctgaacaggaagaaatggaaactcaatcttcagacttcccaccatccctgacccagccagctcctgatcagtcatccactattcagctacatccagcaacctcaccagcagtctcgccaacaacctccccagcagtctccctagtggtttctccagcagcctccccagaaatctctccagaagtttgtcccgcagcttctacagttgtctctccagcagtcttctcagtggtctctccagcttcctcagcagtcctcccagcagtctccttagaagtcccgttgacggcttcagtgacatccccaaaagcctctcccgtaacttccccagcagctgcctttccaacagcctccccagcaaataaggatgtcagcagctttctagaaaccactgctgacgtggaagagatcactggagaaggactcactgcttctggtagtggtgatgtcatgaggagacgtattgctaccccagaagaagttcgtcttcccctccaacatgggtggcggagagaggtgcgcatcaagaagggcagccaccgatggcagggggagacctggtattatggcccctgtgggaagaggatgaagcaatttccagaagtgatcaagtacctgagccgcaacgtggtacacagtgtccgccgagagcacttcagcttcagtccccgtatgcctgttggagatttctttgaagaaagagacacgccagagggcttgcagtgggtgcagctctcagcagaggagatcccgtcgaggattcaggcaattactggcaaacggggtcgacctcgaaacactgagaaggctaagactaaggaagtccccaaggtgaaacggggtcgaggtcggccacctaaggtcaaaatcactgagctattgaacaagacagacaaccgccccctaaagaaactggaggcccaagaaacattgaatgaggaggataaagcaaagattgctaaaagcaagaagaagatgaggcagaaggttcaacggggagagtgtcagactactatccaagggcaggccagaaataagcggaaacaagagaccaagagcttaaagcagaaggaagctaagaagaaatccaaggctgagaaagaaaaaggaaagacaaagcaggaaaaactgaaggaaaaagtcaagagggaaaagaaggagaaggtaaaaatgaaggaaaaggaggaggtgaccaaagccaagccagcctgtaaagcagataagaccctggccacacagaggcgcttggaggaacggcagaggcagcagatgatcttggaggaaatgaagaagccgacagaggatatgtgtctgactgaccaccagcccctgcctgacttctcacgagtccctggtctgacattgcccagtggagccttctcagactgcttgaccattgtggagttcctgcatagctttggcaaggtgctgggctttgatcctgccaaagatgtgcctagcctgggggtcctgcaggagggactcctgtgtcaaggtgacagcttgggtgaggtgcaagacctgctggtcaggctgctgaaggctgcactccatgatcctggctttccctcctactgtcagtccctaaagatcttgggggagaaggtgtctgagatcccactgacaagagacaatgtgtcagagatcctgcgctgcttccttatggcatatggagtagagccagccctctgtgaccgcctgcgcacccagccttttcaggcccagccaccccagcagaaggctgctgtcctggccttccttgtgcatgagctcaatggctccaccctcatcatcaatgagattgacaagactctggagagtatgtccagctacaggaaaaacaagtggattgttgaaggccggctccggaggctgaaaactgttctggccaagcgaactgggcggtctgaagtagagatggaagggccagaggaatgcctgggacggaggcgcagttctcggatcatggaggagaccagtggcatggaagaagaggaagaagaggagtctatagcagctgtccctggccgcaggggtcgaagagatggagaggttgatgccacagcatctagcatcccagagctagagcgccagatagaaaaactcagcaagcgtcagcttttctttcgcaaaaagctgcttcactcatcccagatgcttcgggcggtctccctgggtcaggaccgctacagacgtcgctactgggtattgccgtatttggctggtatctttgtagaaggaacagaggggaacttagttcctgaggaggtgataaagaaggaaactgactccttaaaagtggcagcccatgcgtcactcaaccctgccctcttctctatgaagatggagttagctggctccaacaccactgccagttctcctgcccgggcccgaggccgacctcgaaaaactaagcccgggtctatgcaacctaggcatcttaagtcccctgtcaggggtcaggattcagaacagccccaggcccagcttcagcctgaggctcagcttcatgctcctgcccagccccagcctcagcttcagcttcagcttcagtcccataaggggttcctggagcaagaaggctcccctttgtcactgggtcagagccagcatgacctcagccagtcagccttcctgtcttggctgagccagactcagagccatagctccctgttgagcagctcagtcctcacacctgatagcagtccgggaaaactagacccagctccatcacaacccccggaggagccagagcctgatgaggcagaatccagccctgatcctcaagcactctggtttaacatctcagcccagatgccctgcaatgctgcccccacaccgccccctgcagtttctgaggaccaacccactccctcccctcagcagcttgcctcctccaagccaatgaatagacctagtgctgccaacccttgttctccagtgcagttctcttccacgcccttggctgggttggcccctaagaggcgagcaggagaccctggagaaatgccacagagtcccacagggctgggacagcccaaacggagagggagacctcccagtaagttcttcaaacagatggaacagcgttacctaacccagctgacagcccagcctgtcccacctgagatgtgctcaggctggtggtggatacgagatcctgagatgttggatgccatgctcaaggccctacacccccgaggtatccgggagaaggcacttcacaaacaccttaacaagcacagggacttcttgcaggaagtctgcctgcggccctcagctgaccccatctttgagcccaggcaactacctgcctttcaagaagggattatgagctggtcccccaaagagaagacatacgagacagacctagcagtgcttcaatgggtagaggagctggagcagcgggttatcatgtctgatctgcagattcggggctggacatgtcctagcccagactctacccgtgaagacttggcctactgtgagcacctctccgactcccaggaggatatcacctggcgaggtcggggcagggagggactggcacctcagcgtaaaactaccaaccctttggacctggctgtgatgcggctggctgccctggaacagaatgtagaacggcggtacctgcgggagcccctctggccaactcatgaggttgtgctggagaaggccctgcttagcacacctaatggtgcccctgagggcaccactacagagatatcatatgagatcacccctcgcattcgtgtctggcgccagaccctcgagcggtgccggagcgcagcccaggtgtgcttgtgcctgggccagctggagaggtccattgcctgggagaagtctgtcaacaaagtgacatgtctagtctgccggaagggtgacaatgatgagtttcttctgctttgtgatgggtgtgaccgtggctgccacatttactgccatcgtcccaagatggaggctgtcccagaaggagattggttctgtactgtctgtttggctcagcaggtggagggagaattcactcagaagcctggtttcccaaagcgtggccagaagcggaaaagtggttattcgctgaacttctcagagggtgatggccgccgacgccgggtactgttgaggggccgagaaagcccagcagcagggcctcggtactcggaagaagggctctccccctccaagcggcggcgactctctatgcggaaccaccacagtgatctcacattttgcgagattatcctgatggagatggagtcccatgatgcagcctggcctttcctagagcctgtgaacccacgtttggtgagtgggtaccggcgcatcatcaaaaatcctatggatttttccaccatgcgggagcggctgctcaggggagggtacaccagctcagaggagtttgcggctgatgccctcctggtatttgacaactgccagactttcaacgaggatgactctgaagtaggcaaggctgggcacatcatgcgccgcttcttcgagagccgctgggaggagttttatcagggaaaacaggccaatctgtgaggcaagggaggtggggagtcaccttgtggcatctccccccaccttccaaacaaaaacctgccattttcacctgctgatgctgccctgggtccagactcaagtcagatacaaccctgatttttgaccttgcccttggcagtgccccacatcctcttattcctacatccctttctcccttccctcctcttgctcctcaagtaagaggtgcagagatgaggtccttctggactaaaagccaaaaaaagaaagaaaaaaataatttttcttttctgttttatttgctaattaaaaatggggagggggaaagtcgtccctacttcctcctccctgcttcctctcctcccctgtacgtgccccagcattctggggttatttaacaatagcaatagttctagtgaatgtgtgaaaccaagaaacactctgtactgtgtgcggacccgcagtgacggccagtaaagtggacttaactcccaagtgtgtcgcgccggacaccgggccctggacatgctgcttccatgttcagtcccttccctgcttctcgctgtctttcttttcccacctcccaccccccagttttcagattttctctcatccaataatgtaaaactatcgtgtacgggttcctccctccttttctcttctcccaaatcttttcccttcaaaggaaaaaaaaatgttcagaggtccctgtcttctgtccccatcttcctgccgatagctatcccctgtatgatgttggatgctcctcacatgctgagtttccagccttttctgaaactcagtagctggggagagggcagggaggcttcctgggccttccagcctccttccccacctccttcccaaaccctcttgggaactcctcagggacaactactgctgagtttgggtgcaccctaagatggaggccaggtagcaatggggccggcctcagagagagcgctgtgtgtgtgtgtgtggcgctgtgtgtgtgtgtgtgtgtgtgtgtgtgtgcgtgcttgtgaccctgtattgtttgataggatccattcagtttccccaagtacctgttttcattcccatttttcccattgtttaaaaccatcacttttttgtctttgggaaaccacaggaacaatttctctggagacaaggctgtgtctctctcctggtcatttttgttccagcctcttcagactgtgcaatctttcagcaggaactccctctcttctcggtagctttgaatcttaagcttctacgggagagtggtagaactggatcatttcctaatcccatttagttgtgcttttcttcatttacttcataccccaggaccccttccccagcagcagagaccctggagcacaggagagtagggaggaggggttctgggtccatcactgccctacatgtgactatgtccaagttaagcccccaacacgagaggaaagctgctgactcccagctatagccatgggcacttggccccctgcttttcctgctcagcagagcccctcccttcagagattacgggtacttgcactggggaggtggctgctggctggcccaagcagagagctgaggcatccaagaaatgttccattggggggtgggggtgccaggtgaggtggagcattccttgtattctggcagcactgaagagccactgaagggggtaggggcagtgtaggtcctggggcagcccctttattcctttatgccccttctccctcatagcctatttctaaagtcgccttttctgtcagataaacctcaaaacttttaattttatttgagatttttttttgcttttaagaggtggattgaagaatatttgaattgactttatattatgcataaatatttatattttatctaaataactgcgctgtaacaaactttgtgttagacagttgaaactgttagagttgggggctctgctttttccccctggcaattttcccctggtataagatgtgctagattaatttcattgtgaggtggatgggggagtgaaattgtgaggtggatgggggagtgaaatctccatggttcctgctttgtgttcctctcccagctccatctctttccctagggaccaggcactcatatggcggggtggggtcctagcctcagtttgaagaagtgggggctggagcggggttgggggtggtagggatagggcatgatcaaaggggccatttcttgcttttctttcctcatcttcactgcccccttgagctaggtggattttctcttcatgacaagagtatttggtagggaaagcaggtttaaaataaaaagacaacccaccccctgcccttttgcttccctcccatcagtctggttgacaggaagaaaccacaccatcaacaccaacaagtttctgtgttccttttacagcaaaagggactttttatataaccaaatgtggtgttttagtgactttttgataatgtacagttttttgtgaatttaaatttatttctttctatatttttaggaccaatctcatttttaataaggttaaaaagaaaaaaaaagtctagcgaaaaaactcctgtttttgccatgtgatgttccacaagtgcagctgtagaaaagtgcttgtcagttgttgaataaaaaaaccacatttgatagagattcaaaagactctgtgtattcatcttcccttctacacacctgagggggagacggcgttgggataggtatgactggcttaagagaccacaggcaagggaacaacaggggctcctgttccataccctctgtgtggatggaaagggtcattagtgctcctgcctaaatgtctggctgagttgctggagcaaagggggattcagtgcatccaggtcctgccttgtgagatgtggccccagcttcctaagctgccacctctgtgttcctgtcatagcaaatatgggaccatcaccagcttaccacttcccactcacggataagacaccaagacgtagacttttgtgttttatttaaaaaaaaaaaagtgtgaagtaagacaaaatggacctctaccaagttgtagggaaggacaaggaaaagaccaggggtagaaaaggagtgtaagttttagaatggtggcattggcatagatgtgggaagagtataaaactagaagaagtctccagataaaaatatgcaaaatatgtctgtttaagtataaacattttctgtccacatgcaaagaggtgtttacccacccaaaaagggtatatgttggagtggggacttcactcgcgctggatatgtattaccctccagcctggaaactttgtcttggtgcaaccccctaaactgtatgttaaggtagaaaaggaacattcgcttccagccttataaaaatgacagactccctctttggtgtttggttaccttcacagctatacgccagccactgagcagctttcttgtcctcttaagttctaaactctgctcctatgctggtgtcctccaaccattacttattaccctaagccgtcactgcacagcctactcccctggcctatcacagcaggacctatctggagagttcacactattctagggcgatcagtgagctaaaaatcccagagaaaacactgtaggaatagaaattcccaagtttaattcccaagagtttaaaaattatga

SEQ ID NO: 239 - DNA, 3006 bp, HOMO SAPIENS
gcttccctgggtgccacggtcatgtgacttcggcaagatggctgccctgacagcggagcattttgcagcactccagagcctgctcaaggcctcctcgaaagatgttgtcagacagctgtgtcaagaaagcttttccagttcagcccttggcttgaaaaaactcttggatgttacatgttccagcttgtctgtgacccaggaggaggcagaggaactgctccaggctctgcaccgcctcactaggctggtggcattccgtgacctgtcctctgccgaggcaattctggctctctttccagaaaatttccaccaaaacctcaaaaacctgctgacaaagatcatcctagaacatgtgtctacttggagaaccgaagcccaggcaaatcagatctctctgccacgcctggtcgatctggactggagagtggatatcaaaacctcctcagacagcatcagccgcatggccgtccccacctgcctgctccagatgaagatccaagaagatcccagcctatgcggagacaaaccctccatctcagctgtcaccgtggagctgagcaaagaaacactggacaccatgttagatggcctgggccgcatccgagaccaactctctgccgtggccagtaaatgatccagccagctgccagggccactgccatgacccagctgctcatgagtgataaatgtctccccatatgcaggctgcccttgcagctgcagctgacaacaggcaggatggtggggacagcagggggctactgccatccagaagttacagttggattgggaagaagcagccagatcccccgctgttctcactcatcttctttctctttctgaagctggagagcagaagcccccatctttgaaaagctcctgagtgcaacttaattaccaccatggcagggtgagggaacatttgcatcgtcagctgcctctgcatagctgtttgagaaattcaggcccaaatcatgcagcctatccaataagtaagtttatttccaacattagctctaattagttcatttccaatcccagaacacatggagggaatcggacaggtgatgccagcagttcctgctcctctgtcagggaagccaggcagagcccacagagcatggtccatccagagtgttccctgagccccctccaccatactggaacccctcttcagtgtaggaagtctgaaatgggtgctaattcccttcttcatgaaaccagggccctcttccttcatctaatgcagccactcctaggtgaagaagtgggaataattggaaataaacaacagttctaaaacttccatgatttttgtagcttcttttgtccccaagttgaagcttttggccagtaccttctctagtttttaaagatgatcccaacttcctaattcccagctaagcccttgacccatggtgtgacatgaaatcaggcaattgaatcgcaccactttctgtgttttcacctgttacgtagaacaaaaggaagcaaggtggccaggcgcaatggctcacgcctgtaatcccagcactttgggaggccgaggcaggcagatcatgaggtcaggagatcgagaccatggtgaaaccccatctctactaaaaatacaaaaaattagctgggcgcggtggcgggcatctgtagtcccagctcctcgggaggctgaggcaggagaatggcgtgaacctgggaggcagagcttgcagtgagccgagatcgtgccactgcactccagtctgggtgacagagaaggactcgtctcaaaaaataaaaataaataaaaaggaagcaaggctaatcatcagtatgtgcttgttacaagagctatgatgaaggcactccttcgagtttaaccaaatgagatcatctctgtcatgtgcctcacgcctcacagggactccatgtgtgaagattcccccttcactcaccagatcatctccatggcaacagcttgcagcctgctcttggagtgctttgttttggcagcttctctgctagtttgtgtatggagtgaatggaggaggtaaatccacagattaagaatatgctgtcaggagtcaggcagccaaggtcagaagccagctctgcttctcagtggtaaggtgcttgacttctacatctcaattttcacccactttgtacttttttcctaaattaaatgagtataatagtagtacctacttgataggacttttgtgaaaattaaatgatataatgcacctaaaaacagtactgttacaactaataggaaaggctttgattattaatggatgagagtagaaagcttggtgcatttattgtctcatctactataacagagttggtgtgagaattagtattatcatcctccctttattgaccaggaaaccagctcattgagattgagtcatctgctggtaaatggtctcattaagaggtggacccatatttctctagctttctctttacaacacaggactttgcaaggaacatataattctgtgactagcgccatttggaaaatgttgaaactgaagtagagatgagagatcttacgtctgcctacccagtgagatacgaggaaggtcaagggaaaaaaaattccaagctcttctttatctgctataggaaatgaacattcaattttttgcatgcaacgacaagaggtcaaggaccccagaagccagcccgctacttccaagttgagagcccctggtcataccctccagttgagctcagatttgtcacaaatttacccctctcctttccttccattccccatgacctgcagagagagatgtcagataccttcctcttggcctcccatgggcatccataagaaacttacttgaagcaagaagcccagtataggtgtctgggcagttggacatttcctctagccagatctgtccgaatagagccatctgggtacatgacgcagagggcatttgataaataactggaaaagtcaataaatctttgctacccttcaaaaaaaaaaaaaaaaaaaaaaaaaaaaaaaaa

SEQ ID NO: 240 - DNA, 3307 bp, HOMO SAPIENS
gctgcggctcgccgcgcggctccagctggggcgcggtggtcccgacggtcacccgaatcgcagggagtcgccgctggagaggggctcggcgcccggcggggactgcaggcgatgacccaggatgcagccaggggccacgacatgcacggaggaccgcatccagcatgccctggaacgctgcctgcatggactcagcctcagccgccgctccacctcctggtcagctgggctgtgtctgaactgctggagcctgcaggagctggtcagcagggacccgggccacttccttatcctccttgagcagatcctgcagaagacccgagaggtccaggagaagggcacctacgacctgctcaccccgctggccctgctcttctattccactgttctttgtacaccacacttcccaccagactcggatctccttctgaaggcagccagcacctaccaccggttcctgacctggcctgttccttactgcagcatctgccaggagctgctcaccttcattgatgctgaactcaaggccccagggatctcctaccagagactggtgagggctgagcagggcctgcccatcaggagtcaccgcagctccaccgtcaccgtgctgctgctgaacccagtggaagtgcaggccgagttccttgctgtagccaataagctgagtacgcccggacactcgcctcacagtgcctacaccaccctgctcctgcacgccttccaggccacctttggggcccactgtgacgtcccgggcctgcactgcaggctacaggccaagaccctggcagagcttgaggacatcttcacggagaccgcagaggcacaggagctggcatctggcatcggggatgctgcagaggcccggcggtggctcaggaccaagctgcaggcggtgggagaaaaagctggcttccctggggtgttagacactgcaaaaccagggaagctccacaccatccccatccctgtcgccaggtgctacacctacagctggagccaggacagctttgacatcctgcaggaaatcctgctcaaggaacaggagctactccagccagggatcctgggagatgatgaagaggaggaagaggaggaggaggaggtggaggaggacttggaaactgacgggcactgtgccgagagagattccctgctctccaccagctctttggcgtcccatgactccaccttgtcccttgcatcctcccaggcctcggggccggccctctcgcgccatctgctgacttcctttgtctcaggcctctctgatggcatggacagcggctacgtggaggacagcgaggagagctcctccgagtggccttggaggcgtggcagccaggaacgccgaggccaccgcaggcctgggcagaagttcatcaggatctataaactcttcaagagcaccagccagctggtactgcggagggactctcggagcctggagggcagctcggacacggccctgcccctgaggcgggcagggagcctctgcagccccctggacgaaccagtatcacccccttcccgggcccagcgctcccgctccctgccccagcccaaactcggtacccagctgcccagctggcttctggcccctgcttcacgcccccagcgccgccgccccttcctgagtggagatgaggatcccaaggcttccacgctacgtgttgtggtctttggctccgatcggatttcagggaaggtggctcgggcgtacagcaaccttcggcggctggagaacaatcgcccactcctcacacggttcttcaaacttcagttcttctacgtgcctgtgaagcgaagtcatgggaccagccctggtgcctgtccaccccctcggagccagacgccctcacccccgacagactcccctaggcacgccagccctggagagctgggcaccaccccatgggaggagagcaccaatgacatctcccactacctcggcatgctggacccctggtatgagcgcaatgtactgggcctcatgcacctgccccctgaagtcctgtgccagcagtccctgaaggctgaagcccaggccctggagggctccccaacccagctgcccatcctggctgacatgctactctactactgccgctttgccgccagaccggtgctgctgcaagtctatcagaccgagctgaccttcatcactggggagaagacgacagagatcttcatccactccttggagctgggtcactccgctgccacacgtgccatcaaggcgtcaggtcctggcagcaagcggctgggcatcgatggcgaccgggaggctgttcctctaacactacagattatttacagcaagggggccatcagtggacgaagtcgctggagcaacctggagaaggtctgtacctccgtgaacctcaacaaggcctgccggaagcaggaggagctggattccagcatggaggccctgacgctaaacctgacagaagtggtgaaaaggcagaactccaaatccaagaagggctttaaccagattagcacatcgcagatcaaagtggacaaggtgcagatcatcggctccaacagctgcccctttgctgtgtgcctggaccaggatgagagaaagatcctgcagagtgtagtcagatgtgaggtctcaccgtgctacaagccagagaagagcgacctctcctcaccaccccagacgcctcctgacctgccggcccaggccgcacctgatctctgctcccttctctgcctgcccatcatgactttcagtggagctctgccctagtgtgggcccagcgccagactggacagaagccctggggcaacctcctcggccacccctccaggacagtccctctctgtggagaactgaatggccctgtgcagagccatagtcccactgtgggtcctgcaatgagcaggggctgggagtagagggtttctggggcctcagggttctgggaaagcaacagctatcagagagagaagggccagaccccatagcctcttagattcctggcagtagaaggagaaggatgggtaaattgacctctgaagtccctgaccattagcatggtctaggatcctttctagaaggaagatctgaggctctggtgctcagggggatggcttgggccttttctctcaaccttggctgagcctaccccttactttgccaaagacttgaggaccctgtatgtctggagttcagtcccctcctctgtggggctcaggtgattgaaatgtggatgaaacatttctctacttcaagaccacctctccctgcaaacaccacacacacatggcatgcatgtacgcacatgcgcac

SEQ ID NO: 241 - DNA, 3522 bp, HOMO SAPIENS
acgcttgcgcggcgagtagaacgtgtggcggcggcggagatcgcgtctctttcgctccgtgtcccgctgctgctcctgtgagcgcccggcgagtccgtcccgtccaccgtccgcagctggtagccagcctgcccctcgcctcgactccctttcaccaacaccgacacccacattgacacctccagtccggccagccgctccactcgttgcctttgcatctccacacatggcgtcctccgcgcagagcggcggctcctccgggggacccgcggtccccaccgtgcagcggggcatcatcaagatggtcctctcagggtgcgccatcattgtccgaggtcagcctcgtggtgggcctcctcctgagcggcagatcaacctcagcaacattcgtgctggaaatcttgctcgccgggcagccgccacacaacctgatgcaaaggatacccctgatgagccctgggcatttccagctcgagagttccttcgaaagaagctgattgggaaggaagtctgtttcacgatagaaaacaagactccccaggggcgagagtatggcatgatctaccttggaaaagataccaatggggaaaacattgcagaatcactggttgcagagggcttagccacccggagagaaggcatgagagctaataatcctgagcagaaccggctttcagaatgtgaagaacaagcaaaggcagccaagaaagggatgtggagtgaggggaacggttcacatactatccgggatctcaagtataccattgaaaacccaaggcactttgtggactcacaccaccagaagcctgttaatgctatcatcgagcatgtgcgggacggcagtgtggtcagggccctgctcctcccagattactacctggttacagtcatgctgtcaggcatcaagtgcccaacttttcgacgggaagcagatggcagtgaaactccagagccttttgctgcagaagccaaatttttcactgagtcgcgactgcttcagagagatgttcagatcattctggagagctgccacaaccagaacattctgggtaccatccttcatccaaatggcaacatcacagagctcctcctgaaggaaggtttcgcacgctgtgtggactggtcgattgcagtttacacccggggcgcagaaaagctgagggcggcagagaggtttgccaaagagcgcaggctgagaatatggagagactatgtggctcccacagctaatttggaccaaaaggacaagcagtttgttgccaaggtgatgcaggttctgaatgctgatgccattgttgtgaagctgaactcaggcgattacaagacgattcacctgtccagcatccgaccaccgaggctggagggggagaacacccaggataagaacaagaaactgcgtcccctgtatgacattccttacatgtttgaggcccgggaatttcttcgaaaaaagcttattgggaagaaggtcaatgtgacggtggactacattagaccagccagcccagccacagagacagtgcctgccttttcagagcgtacctgtgccactgtcaccattggaggaataaacattgctgaggctcttgtcagcaaaggtctagccacagtgatcagataccggcaggatgatgaccagagatcatcacactacgatgaactgcttgctgcagaggccagagctattaagaatggcaaaggattgcatagcaagaaggaagtgcctatccaccgtgttgcagatatatctggggatacccaaaaagcaaagcagttcctgccttttcttcagcgggcaggtcgttctgaagctgtggtggaatacgtcttcagtggttctcgtctcaaactctatttgccaaaggaaacttgccttatcaccttcttgcttgcaggcattgaatgccccagaggagcccgaaacctcccaggcttggtgcaggaaggagagcccttcagcgaggaagctacacttttcaccaaggaactggtgctgcagcgagaggtggaggtggaggtggagagcatggacaaggccggcaactttatcggctggctgcacatcgacggtgccaacctgtccgtcctgctggtggagcacgcgctctccaaggtccacttcaccgccgaacgcagctcctactacaagtccctgctgtctgccgaggaggccgcaaagcagaagaaagagaaggtctgggcccactatgaggagcagcccgtggaggaggtgatgccagtgctggaggagaaggagcgatctgctagctacaagcccgtgtttgtgactgagatcactgatgacctgcacttctacgtgcaggatgtggagaccggcacccagttggagaagctgatggagaacatgcgcaatgacattgccagtcacccccctgtagagggctcctatgccccccgcaggggagagttctgcattgccaaatttgtagatggagaatggtaccgtgcccgagtagagaaagtcgagtctcctgccaaaatacatgtcttctacattgactacggcaacagagaggtcctgccatccacccgcctgggtaccctatcacctgccttcagcactcgggtgctgccagctcaagccacggagtatgccttcgccttcatccaggtgccccaagatgatgatgcccgcacggacgccgtggacagcgtagttcgggatatccagaacactcagtgcctgctcaacgtggaacacctgagtgccggctgcccccatgtcaccctgcagtttgcagattccaagggcgatgtggggctgggcttggtgaaggaagggctggtcatggtggaggtgcgcaaggagaaacagttccagaaagtgatcacagaatacctgaatgcccaagagtcagccaagagcgccaggctgaacctgtggcgctatggagactttcgagctgatgatgcagacgaatttggctacagccgctaaggaggggatcgggtttggcccccagccccgctcacgccagtccctcttcctctgccgggagggtgttttcaactccaaaccccagagaggggttgtagattgggtccagctttgcttcagtgtgtggaaatgtctcgtggggtggcatcggggctgcggggtggggaccccaaggctttctggggcagacccttgtcctctgggatgatgggcactgctatccacagtctctgccagttggttttatttggaggtttgtgggctttttttaaaaaaaaaaagtcctcaaatcaggaagaaacatcaaagactatgtcctagtggagggagtaatcctaacacccaggctggccgccagctggcacctgcctctatcccagactgccctcgtcccagctctctgtccaactgttgattatgtgatttttctgatacgtccattctcaaatgccagtgtgttcacatcttcgctctggccagcccattctgtatttaaagcttttgaggcccaataaaatagtacgtgctgtctgcagcccttattgatcaaaaaaaaaaaaaaa

SEQ ID NO: 242 - DNA, 5515 bp, HOMO SAPIENS
cagcccgggaatcaaccaccggaagtgccggccctgagaggtggagtcggggtggcagcggcggcggttgccaggagcccgcgttgcagcctgagatccgtaatatggcggggaggaggaggagaaggcggcggcggaccgagctgcgctctgtcagtaccatttgagccattcgcttcctgacaaggcccgtggcgaggggagaggagctgaaggggccgtgggggatcagtgcctgctgtgtgctgatactgttctgtgtaatggggattcagtgaacaagactgaaaaggtacctgtacttatggcgcttacattttggtggaggaagacagacaaaaatcaaggaaataaacacgataatttcagatagtgtgtgactgtgggaagatggaggagtatgagaagttctgtgaaaaaagtcttgccagaatacaagaagcatcactatccacagagagctttctccctgctcagtctgaaagtatctcacttattcgctttcatggagtggctatcctttctccactgcttaacattgagaaaagaaaggaaatgcaacaagaaaagcagaaagcacttgatgtagaagcaagaaagcaggttaacaggaagaaagctttactgactcgtgtccaggagattcttgacaatgttcaggttagaaaagcacctaatgccagtgattttgatcagtgggagatggaaacagtttactctaattcagaagtcagaaacttgaatgttcctgctacatttccaaatagctttccaagccatacggaacactctactgcagcaaagcttgataagatagctgggattttgccattggataatgaggaccaatgtaaaactgatggaatagacttagctagagattcagaaggatttaattctccgaagcaatgtgatagttccaatattagtcatgtagaaaatgaagcttttccaaagacctcttcagcaaccccacaagaaactcttatttctgatggtcccttctcagtaaatgaacaacaggatctaccacttttggcagaagtcatcccagatccctatgtaatgagtcttcagaatctgatgaaaaagtcaaaggaatatatagaaagagaacaatctagacgcagtctgagaggtagtatgaacagaattgttaatgagagtcatttagacaaagaacatgatgctgttgaagtggctgactgtgtaaaagagaaaggccagttgacaggcaaacactgtgtctcagttattcctgacaaaccaagccttaataaatcaaatgttcttctccaaggtgcttccactcaagcaagcagcatgagtatgccagttttagctagcttttcgaaagtggacatacctatacgaactggccatcccactgttctagagtctaattctgattttaaagttattcccacttttgttaccgaaaataatgttatcaaaagtcttacaggttcatatgccaaattacctagtccagagccaagtatgagtcctaaaatgcaccgaagacgttccaggacatcatcagcgtgtcatatacttataaataacccaataaatgcctgtgaattaagccctaaaggaaaagaacaggcaatggacttaattattcaagatactgatgaaaacacaaatgtgcccgaaattatgccaaagttaccaactgatttagcgggagtttgttcaagcaaggtttatgtgggcaaaaatacatctgaagtcaaagaagatgtggttttaggtaaatcaaatcaggtatgtcaatcttcaggaaatcatttagaaaataaagttactcatggacttgttactgtggaaggtcagttaacatccgatgagagaggcgcacacataatgaacagtacctgtgctgcgatgccaaagctgcatgaaccatatgccagcagtcagtgtatagcaagtccaaactttggaactgtgagtggactcaagccagccagtatgttagagaaaaactgcagtttgcaaacagaactgaataagtcttatgatgtaaaaaacccttctcctttattgatgcaaaaccagaatacgagacagcagatggacacacctatggtgtcctgtggaaatgaacaatttttggataacagttttgagaaagttaaacggagacttgatttagatattgatggtttgcaaaaagaaaactgcccttatgtcataacaagtggaataactgaacaagaaaggcaacatttgccagaaaaaagataccctaagggatctggcttcgttaacaagaataaaatgttaggaactagttccaaagaaagcgaggagttactaaaaagcaagatgttagcttttgaagaaatgcggaagagactagaagaacagcacgcccagcaattatcactactcatagctgagcaggaaagggaacaagaaagactgcaaaaggaaatagaagagcaggagaaaatgttaaaagagaagaaggcaatgacagcggaagcctctgagttggacattaacaatgcagtggaattagaatggagaaaaataagtgactctagtttgctggaaacaatgctgtctcaagcggactcactccatacttcaaattcaaatagttctggtttcacaaattctgccatgcaatatagctttgtttctgcaaacgaagcaccattctacctctggggatcatcaactagtggcttgaccaaactctcagtaacaaggccttttggaagagccaaaactagatggtctcaagtttttagtctggaaatacaagcaaaatttaacaaaataactgcagtggcaaaaggatttcttactcgtagacttatgcagacagataagctgaagcaacttcgacaaactgtaaaagatactatggaattcataagaagttttcagtcagaagcaccattaaagagaggcattgtttcagctcaagatgcttcacttcaggaaagagtgttagctcagttgcgagctgccttgtacggtattcatgacatattctttgtaatggatgcagctgaaagaatgtctattctacatcatgatcgagaagttcgcaaagagaaaatgctcaggcaaatggataaaatgaaaagtccacgagtggctctttcagctgcaacacagaagtctcttgataggaagaaatacatgaaagctgctgaaatgggaatgccaaataagaaatttctggttaaacaaaatccttctgaaacaagagtccttcagccaaaccaaggacagaatgcacctgttcataggctacttagtagacaagggagtatatgcaggaaaaatccaaagaaagcggccaaatgttgcgacaatttaagaagacaacattcattaggataaaatggggggaaggattattattcatgttattttccctgcccaagactttatttaaccctggactccgtttacacagacaaagtgacatcagaaggctgagcacttatctggatcatttggtcagtttggtaattcctgctccacacccctattttcctcttaataatacgtttgggtgaagacaaattagtgtttagtaattgcatcatctctgtgcttacctatacaaacataagtttattttatatgcccagatgtctacagagaccctttttgtaaatgtcaaggacatttggatttacttttacagaatattgaaaagataagacaaattataaataagttctaaaacataaatttaattcatctctgcatagtgatttttgaatttgattcaaagggaaattattgcagaagaatgcctttccctcattttataactttaaaaacttggattaaccactcaatgtccactttctttgacttacagtataaccatgtagccaattgtggcccactaaaatctacagaagttaatgtgggtcaccattttggtcagaagcatacattcctgtcagacaactagttgtctgacagaaatgttaggcttcatgtatgttaccccagtactgttagaaacatttgtactaggttataagatctttctgtgacaggtaacaaatttggggaagacagcacaatcttcttgaatgtagctcttgggaatgcattattacatccatttctgtaacataataatatgttgcatgcagttatattttctatttagtctgtatattttgttcttcatagtctgttttttctagcatgcttgatttaggagagaataaagggctatataataataaatccagatttccggataagaatattgcctggttaaaattctgcattgcttaaagacacccatgtttaagatttttcatcactaacatatccattaaaagtatcaactggccaggcagggtggctcacgcctgtactcccagcattttgtgaggccaaggtgggtggatcacctgaggtcaggagtttgagaccagcctgaccaaacatggcgaaaccccatctgtactgaaaatacaaaaattaggcatggtggtgcatgcctgtagttccagctacttgggaggctgagacaggcgaattgcttgaacctgggaggcagaggttgcagtgagctgagactgtgccattgcactccagtcgggttaacagagcaagacactgtctcaaaaaaaaaaaaaaaaaaaagtatcaaccaacaaatgttaccaagataacgtgacttcatgagggagaatgtcactattaatttatcataccatttccaaaaagggctttgtgcttttcacataaaattgagacagtgtatatttaatctaatttaaattttaaagagatactggtattttgaaaatgcaacctatatatattcttaatatccttttaagaatatggagatgaagattgttttctccaattttctgtgccattttaaatttaactttgacatccagctatagacagaaataataagccaccctgggtgtaaacttgattttctttattgagatgtatcatgtattgaatgagtgaaccagaaaattagaagatggtcaaaaaaagtccaagttaccaattttttaaaatttataggcaaagtatcaaattgtcttcttaatatgataaactgtgctttatcattctgaaaactcaggatacagcttattcatagcattgtgggtctctccagtaagaaagatgctaaaagttttgtgcactttttgtgtgtgtaatgcaaattagttaaaacaaatagttttggagaaagttaaaactagctttagagtaaggatgagaaacttgagtgtttttaatttaaagataaaagcctgtgttttacacattcttttttggtgttcatagcttcttctcatacaggtgccagacactgtttgtgcttttgatggatttttatttatatactttttttgcttatttttactttgagtggaatgttcattaatgtaaattgtatttatttttatacttttattttcactagttttgcttctaggcaaaaagcaaaataaacttttcatcttaaagaaaaaaaaaaaaaaaa

SEQ ID NO: 243 - DNA, 4077 bp, HOMO SAPIENS
gcggctggtccaagcccggcgctgggggcgcgcagccgagaaagggtttgacgtggcagttcccagcccagctgcaactccgagcgtgagtccaggctaaggggacgccggccggggaagaggcgcggcgggagaagcgaccgcagcgggagcccggccaccgagggctgccggcactaggcgcagagccgccagcgctcggaagcccgcggggtgcgggagcgggaacagacttcttttgtagaattatcctatggaatgatattttcataatgagtcaacaaggttacgtggctacacctccgtattctcagcctcagcctggaataggcctttctccacctcattatgggcactatggggatccgtcgcacacagcatctccaacaggtatgatgaagccagcagggcctttgggggccaccgccactaggggaatgttgcctccgggtcccccacctcctggaccccatcagtttggtcagaatggagctcatgccactggtcaccctccccaaagatttccaggccctccacctgtcaacaatgtggcatcctcacatgcaccataccaaccctctgcacaatcttcttatccaggtcctatatccacttcatctgtcacccagctgggcagccagctcagtgctatgcaaatcaacagctatggttcaggcatggctcctccaagccagggaccccctggccctctgtcagccacatcattgcagactcctccacgacctccacagccttccattttgcagcctggatctcaagttcttccaccaccacccaccacactcaatggtcctggtgcctcacctttgcctctaccaatgtacagaccagatgggctctctgggcctcctcctccaaatgcccagtaccagcccccacctcttccaggccagaccttgggtgctggatatcctccgcagcaggccaactctggtccccagatggcaggcgcacaactgtcttacccaggaggcttccctggaggtcctgcacagatggctggtccgccacagccccagaagaagctggatcctgactctatccctagcccaatccaggtgattgagaatgatagagccagcagaggaggacaagtttatgccaccaacaccagaggccagatccctcccctggtcactacagattgcatgatacaagaccaaggaaatgccagtcctcgattcatccgttgtacaacatactgttttccatgcacgtcagatatggctaagcaagctcagattccattagctgctgtcatcaagccctttgccaccattccttcaaatgagagtcccctttacttggtaaatcacggcgagagtggaccagtcagatgcaacaggtgcaaggcctacatgtgcccatttatgcagttcatcgaaggaggaaggagatatcagtgtggattttgcaactgtgtgaatgatgttccaccattctatttccaacatctggaccacattggaagaagactggaccactatgagaaaccagagttatctctaggatcttatgaatatgttgccactttggattattgcagaaagagtaagcctcccaacccaccagcctttatcttcatgattgatgtttcatatagtaacataaagaatggacttgtcaagctcatatgtgaagaactgaagaccatgctggaaaaaattccaaaggaagagcaagaagagacgtctgcaattcgagtgggttttatcacatataacaaagttctccatttctttaatgtgaagagtaatctggcccagcctcagatgatggtggtgactgatgttggagaagtctttgttcctttgttggatggtttccttgtcaactatcaagaatcccaatctgtgattcataatttgttggaccagattccagacatgtttgcagactctaatgaaaatgagactgtctttgctcctgtcatccaggctggcatggaagcactaaaggcagcagactgtcctgggaagctgttcatcttccattcttccttgccaactgctgaagcaccagggaagctcaaaaacagagatgacaaaaaactggttaatacagacaaagagaagatacttttccagccccaaacaaatgtctatgactcattggccaaggactgcgtggctcacggctgctctgtgacactcttcctctttcctagtcagtatgtggacgtggcctcgctggggctggttcctcagctcactggaggaaccctttacaaatacaacaatttccagatgcacttggatagacaacaatttttgaacgacctcagaaatgatattgaaaagaaaataggctttgatgctattatgagggttcgtaccagcacaggtttcagagccactgatttctttggtggaatcttgatgaacaacaccaccgatgtagaaatggctgccatcgattgtgacaaggcagtgaccgtggagttcaagcacgatgacaaactcagtgaagacagtggagccttaatccagtgtgctgtgctttacacgacaatcagtggtcaaagaagacttcggattcacaatcttggcttaaactgcagctctcagctagctgatctttataagagctgtgagacagatgctcttatcaacttctttgccaagtcagcttttaaagcagttctccaccagcctttgaaggtcatccgggaaattctagttaatcagactgcccatatgttggcatgttaccggaagaattgtgcaagtccttctgcagcaagccagcttattctaccagattccatgaaagtattgccagtgtacatgaattgcttgttgaaaaactgtgtactactcagcagaccagagatctcaactgatgaacgagcataccagagacagctggtcatgaccatgggtgtggctgactctcagcttttcttctacccacaacttctgcccatacacacgttagatgtcaagagtacaatgttacctgctgccgttcgttgctctgagtcccgtctttcagaagaaggaatattcttactggctaatggtctacacatgttcctgtggttgggagtaagcagcccaccagaactgatccaaggaatatttaatgtgccatcttttgcacatatcaacacagatatgacattgctgcctgaagtgggaaacccatactctcaacaactcagaatgataatgggtattatccaacaaaagaggccatattcaatgaagctcacaattgtaaagcagcgagaacaaccagaaatggttttccgacagttcctggtagaagacaaaggactttacggaggctcttcttatgtggatttcctttgttgtgttcacaaggagatctgtcagctgcttaattaattgaaacttctctgtcattgatgttgcatttccaaggagataatctccttcttggtgcctaattttctagatgataataggctagttttgatttcttgctcattttcagaataactttccaggaagagatggcatttagaacttcagctttggtgctcaggtataaagccaattaaggtacaattgtaccataaagggaacaatctgtttctgattgcacagtttctaatttttaaaactgatgtggtttgcatttcataaaaggcaaagtttacagaaccataaacattctcaattttctttatgctagacatataaattatttttcaaactgtatagatttggggtaaaaagttgtctcagttcctctcccaattgcaatgagaaaaaaaagcttaatttttacattatacttaattttctaaaaccatgtaactccattgaacacatttttcaacttaaggtctgcatagcagacttttaataaccttgggatttatctggtagaacaatatgtgttctacatttttttcataattatatattgtgtatgttaaaactattttccagttgttttgtctgtaaaactgtctttatcaatatgcttaatggttctttgtacaattttgaaagtttctacctgtatataatggatgttaaccagtatcaataaatcacttcgtataatcttaaaaaaaaaaaaaaa

SEQ ID NO: 244 - DNA, 7229 bp, HOMO SAPIENS
attcccctccacttcttgcctgagccgcctgctcctcttggaaacacgttgagcctccccgctggagagggagccagaacagggaagaacggattcacacaggatggcttgcagaagacgctatttcgtcgagggcgaggcccccagcagtgagactggcacatccctggacagcccctcagcctacccccagggccccttggtgcccggttccagcctgagcccggatcactacgagcacacgtcagtgggagcctatgggctgtactcggggccgccggggcaacagcagcgcacgcggaggcccaagctgcagcactcgacctccatcctgcgcaagcaggctgaggaggaggccatcaagcgctcacgctcactctccgagagctatgagctctcctcggacctgcaggacaagcaggtggagatgctagaacgaaagtatggggggcgcctggtaacccgccatgcggcccgcaccatccagacggcgtttcgccagtaccagatgaacaagaacttcgagcgcttgcgcagctccatgtcagagaaccgcatgtcacgccggattgtgctgtccaacatgaggatgcagttctcctttgaggggcctgagaaagtgcacagctcctacttcgaggggaagcaggtctcagtgactaacgacggctcccagctgggagccctggtgtcccctgagtgtggtgacctcagcgagcccaccaccctcaagtctccggccccctccagtgactttgcggacgccatcaccgagctggaggacgccttctctaggcaagtgaaatcactggccgagtccatcgacgatgccctcaactgccgcagcctgcacactgaggaggcaccggccctggatgcggcgcgggcccgggacaccgaaccccagacagccctgcacggcatggaccaccgcaaactggacgagatgacggcctcgtacagtgatgtcaccctgtacatcgatgaggaggagctgtcgccccctctgcccctctcgcaggcaggggaccggccgtccagcaccgagtcggacctgcggctacgggctgggggcgcagccccagactactgggccctggcccacaaagaggacaaggctgacacggacacgagctgccggagcacgccgtcgctggagcggcaggagcagcggctgcgggtggagcatctgccgctgctcaccatcgagccacccagcgacagctctgtggaccttagtgaccgctcggagcgggggtcactcaagaggcagagtgcttacgagcgcagccttggcgggcagcagggcagtcccaagcatggtccccacagcggcgcccccaagagcctcccccgggaggagcctgagttgcggccccggccccccaggcccctggacagccacttggccatcaatggctcagccaaccggcagagcaagtctgagtcggactactcagacggtgacaatgacagcatcaacagcacgtccaactccaacgataccatcaactgcagctccgagtcatcgtcccgtgacagcctgcgggagcagacgctcagcaagcagacctaccacaaggaggcccgcaacagctgggactcgcctgcctttagcaacgatgtcatccgcaagaggcactaccgcatcggcctgaacctcttcaacaagaagcctgagaagggagtccagtacctcatcgagcgtggctttgtgcccgacacgcccgtcggggtggcccacttcctgctgcagcgcaagggcctcagccggcagatgatcggcgagttcctgggcaaccggcagaagcagttcaaccgtgacgtgctcgactgcgtcgtggacgagatggacttctctaccatggagctggatgaggccctcaggaaattccaggcgcacatccgtgtccaaggggaggctcagaaagtggagcggctcatagaggcgttcagccagcgctactgcatctgcaaccctggggtggtgcggcaattccggaacccagacaccattttcatcctggccttcgccatcatcctgctgaacaccgacatgtacagccccaatgtcaagcccgagcggaaaatgaagctagaggacttcatcaagaacctccgaggtgtggacgatggtgaggacattccccgtgagatgctgatggggatctatgaacggatccgtaagcgagagctaaagaccaatgaggaccatgtgtcccaggtgcagaaggtggagaagctcattgtggggaaaaagccgatcggatccctgcatcccgggctcggctgtgtgctctctctgccccaccgtcggttggtctgctactgccggctctttgaggttccagacccaaacaagccccagaaactcggactacaccagcgagaaatcttcctgttcaacgacctcctggtggtcaccaagatcttccagaagaagaagaactcggtgacgtacagcttccgacagtccttctccttgtacggcatgcaggtcctgctcttcgagaaccagtactaccccaatggcatccggctcacctcgtctgtccccggagcagatatcaaagtgttaataaacttcaacgcccccaaccctcaagaccggaagaaattcaccgatgacctgcgggagtccattgcggaagtccaagagatggagaagcacaggatagagtcggagctcgagaagcagaaaggcgtcgtgcggcccagcatgtcccagtgctctagcctcaaaaaggagtcgggcaacggaacactgagccgggcctgcctggacgacagctatgccagcggtgagggcctcaagcgcagcgccctcagcagctccctgcgggacctctcggaagccgggaagcgagggcgtcgcagcagtgcgggatcgctagagagcaatgtggaagggtccatcattagcagtcctcacatgcgccggagagctacatcaacacgagagtgtccatctcgcccacaccagactatgcccaactcatcttccctcctgggctccttattcgggagcaagagagggaagccccctccccaggcccacctgccctcagccccagccctgccacccccccacccaccggtggtcctgcctcacttgcagcactctgtggctggccaccacctggggcccccagaggggctgccgcaggccgccatgcacgggcatcacacccagtactgccacatgcagaaccctcccccgtaccaccatcaccaccaccaccacccaccccagcacatccagcacgcacaccagtaccaccacggcccccatgggggccacccagcctacggggcccatgcccacggccacccgccgctgccctcggcccacgtggggcacacagtgcaccaccatgggcagccccctgccccgccgccccccaccagcagcaaggccaaacccagcggcatcagcacaattgtgtagacagcctgggtaggggtcccaggctccctgaaacacctgcacaccacacagggcacgcccgggggtcgccagccgcacaccaaacccggggcacttctgttgccatctctcccctctgcccctcacggcccaaccggagccccaggagcccacagggctggtgttgtgtggaacaaaggcccagatttcatttcttgttggcaccctgggctctgctcacctcagtctgagggatgggtgggcctcagacaccatcagccttgaaacggtgagccagccaagtagtgttgaactgcctcccccactccagctctcagctccctgtgccctaatgtacatgcatatgaaaacccaacctagaaaacgaagaaatgagatacaaaaacagacaaaacaaaccccaaaacttgctgcattattgctcttttattgacaatgggcaaaaaaataagtagacctgatatggttgatgaaaatacgtaagtaaactttatataaatatataaatatataaatatatatatatatatactgtataggtagtacttgtgtgtgaaaggcaggcgtttcagtccacattagcaatacccaccttacaaggagctccacttacctaataggaagacagtaccttagctgggtgtgtgagacaatagaccaaaccctaaatgctaggaacaaattcagatacttcatattttcatacaaagaagtccctctaggactggctaaaatctttacacaatcattactaactgtgccaagtaacatagcatctaactgtttaaaaagtccagtattgctttgtataaatccttattttattaacagaatactatcataaatagtattataatgctgttatttcaggtaagcaaatagctaaactgcagtacactctacagtagcaactcaggacagctggttacaagctggttgtcttaggacattggttacacggattcttagacactttaatggctgcgataactgtgactctccatgatccatgtttcttttatgcgcatatgatttgacgcacactcattcagagtcctccgagaggggcacccatacacggcagaagtgttcatctccaacatgaaagtgaccagctctcatcctcgtctccccaacaccataacgtcctcatcccgcctccaacccacaccaggccgaagccctcagagagtgttttcatcaggaaccactctcgaacctgaaggttgactttagcgtttagcaacccagggcggtgtgtgtgtttcccgttttgttttctgagtggtagcagtgatcaccgtaattccatgtagccatgtgctagcagaacccctgtgtcctcaccgtggcccgtgtgaccccagccgacgagtgcccggcggagcccccgctgccttcccatggtccagtgagctgccagggcatcacatgactctcagctgtgctcttgtcgcttctgtgttgtggtgacaccatgcgctccccagggccagacctgcacgcggcaggtctgtgcccgagtcacccacgggccatactttgtagtttcagcctttcgagccactgcagccgtcagtgctgtgctcctaagccatgggacccgaggactgccccccggcgcctgcccaggcggaggccctttcagaaagggcgaagctcacgcctgactctgcgggccgcggggccgcgttcccagtggacagcgtggtgagccgtggccggacggcaggaggagaggggagccccctctggctgtgtgtcaccttggctggctggctggccagggttttgccgatttccctcctcacatccctcccaccctcggtcatatcattgagatcaccgtaccagcaaatctgcaaaccaagcactttgttaatctccagagagagcaaatacagcaatctagagtttagcctttttaaaaatgtgactttaacccgcccacctgtgtcctcccattggcgtggcatttctttggtgtctgctcagaaagaaacagcatgggaccgtgtgattgggtccaggctgggctgtcagggaagcgccctggtgtctccgactcatcaattctcgggtcttttttaaaagccaggctccccaaagcactctgtctcgcaattttgaggaggctgttccgacctggaagcgttaaactgctgcatgtcatctggcgtcagctgtgaggctgcgctctgcgtgttgtgcgtttgcaaaatgtattggcgtgactgtaaacacatcgttgaagtaaagcgattacatattgagtatgtcagcttttctcaccctcttctgtgctgggaggagagtctaactgtaacctttaggttgttccagaaaagattcaggccgtttggcacagaattgctctttctgaagggtagcagtaatgaataggaacagacagaaaaccccaggaggggctttcaggaaactctccctctccatcgccatcctgcaagctccacagcctcgggctgccagcctgtggcactgtcctcggtgtgtcctggagctgtgctgggcagcagggcctcgcgtaaggaactgctggaacccactgagcccttcccggggtttcccgccgcactcagtgtgttccttcaggctagtgaggtttcattctgttttatttgcaagcttatcaaaagtttgtggaagatacattgttgggttccagaggctggagtcatgctgcccacatcttgtttgggaaagcaaaagctcccagtgagctggtgtccccgtgtgtctttcatgggactgtcccctttagagatcccacctgtcagagccacagcttcggggtcctgtcatcacatcccctgggaggggaggcaggaggaggccgagggccccaggatgtctgcctggtcccttctcactgtgaggacgcccttggcacacctttctcaagtcacacaaattactgcagttacatacagaattgctgacaggagcaggagacgctgagggaaacagctggcaatgtgacaaaagtcttttctgggacaacaatcaaatcatgtatttgtatttttttaagtttaccaatgaattgtacaacaatgtaaaaataaagttcatcctaatatgctgtgcacatcttgcttaaaaatgtcttcagcacccagtgcagtgatctttccctcacacactgcatgcagcaggagcctcttgtttttcttaatgagctgaaaagacagcagatgttcacagctgatgctgggtgttgactcagcgccacgggaagctctgtgcccgcaggtaagcacgcacagtcttacagttctccttgtaaaatatcatcacccttcctgcctgagaaacgagtacatttgtattttatgtaacaacaatagtcaaggcagcattgcaacactgagcagggtgaggtgggggtgctgagcacaggacaagagggaggaggcctgccctccattcagatgcatctgcatcgcccttctgtgtgcagtcacatcgagactgcacacagcatgcatctcctcttggaaaatatcttttgcctccgagttgttttaagcaattagaatcaggtcctgaatccccagactgttcagagacttcaagggacacctccctcacaagaagcctggcacccccactgtgtacctttgagaggaaaggagtgcgtttgttttcatctgcattctgtttgtcagtggcaacagactctatcaatgtaaaaccatggttgtgatcatgtggggaaatcaaataaatcctttgaaactctaaaaaaaaaaaaaaaaaa

SEQ ID NO: 245 - DNA, 2860 bp, HOMO SAPIENS
gccatcttgcgtacggaggtgaggtttgttaccgcgattctgagaggtgggcttttagtccctccagacctcggctttagtgctgtctccgcttttctttcaccttcacagaggttcgtgtcttcctaaaagaaggttttattgggaggtaaaggtcaatgcgtaggggtagagtaagatgtcttatggtgaaattgaaggtaaattcttgggacctagagaagaagtaacgagtgagccacgctgtaaaaaattgaagtcaaccacagagtcgtatgtttttcacaatcatagtaatgctgattttcacagaatccaagagaaaactggaaatgattgggtccctgtgaccatcattgatgtcagaggacatagttatttgcaggagaacaaaatcaaaactacagatttgcatagacctttgcatgatgagatgcctggtaatagaccagatgttattgaatccattgattcacaggttttacaggaagcacgtcctccattagtatccgcagacgatgagatatatagcacaagtaaagcatttataggacccatttacaaaccccctgagaaaaagaaacgtaatgaagggaggaatgaggcacatgttctaaatggtataaatgacagaggaggacaaaaagagaaacagaaatttaactctgaaaaatcagagattgacaatgaattattccagttttacaaagaaattgaagagcttgaaaaggaaaaagatggttttgagaacagttgtaaagaatctgaaccttctcaggaacaatttgttccattttatgagggtcataataatggtctcttaaaacctgatgaagaaaagaaagatcttagtaataaagctatgccatcacattgtgattatcagcagaacttggggaatgagccagacaaatatccctgtaatggacaagtaatacctacattttgtgacacttcatttacttctttcaggcctgaatggcagtcagtatatccttttatagtgccctatggtccccctcttcccagtttgaactatcatttaaacattcagagattcagtggtccaccaaatccaccatcaaatattttccaagcccaagatgactctcagatacaaaatggatattatgtaaataattgtcatgttaactggaattgcatgacttttgatcagaacaatgaatatactgactgtagtgagaataggagtagtgttcatccctctggaaatggctgcagtatgcaagatcgatatgtgagtaatggtttctgtgaagtcagagaaagatgctggaaagatcattgtatggacaagcataatggaacagacaggtttgtgaaccagcagtttcaagaggaaaagttaaataaattgcagaagttacttattcttttaagaggtctgcctggttctgggaaaacaacattgtctcgaattctgcttggtcagaatcgtgatggcattgtgttcagcactgatgactattttcaccatcaagatgggtacaggtataatgttaatcaacttggtgatgcccatgactggaaccagaacagagcaaaacaagctatcgatcagggaagatctccagttataatagataacactaatatacaagcttgggaaatgaagccatatgtggaagtggccataggaaaaggatacagagtagagtttcatgaacctgaaacttggtggaaatttgatcctgaagaattagaaaagaggaataaacatggtgtgtctcgaaagaagattgctcagatgttggatcgttatgaatatcaaatgtccatttctattgtaatgaattcagtggaaccatcacacaaaagcacacaaagacctcctcctccacaggggagacagaggtggggaggctctcttggctcacataatcgtgtctgtgtcacaaataatcattaaattagctattttcagctaacacatttgttgttgcacttgaaaaagagttagtgagcctgtcttggagtttaagtagtttcaaataaaaaaaggctacagtgcctcacaaaggatgttcccagcaagttgtttaaattcccagcaagttgttaaagtgtaaataaaaatatatgaaattgtattttaaatgtttttatattctcttgttgtaatactcttggctgttatggaagcacctgagtaatagagtggtgggtaggagctaggatgtttttctacaatcgaattttaaactaatttatctattttatagacactattgaacagttttttaatagttcatatctaaatctaacttttcataaaactttacggtttttccttcactaccttaaatatgcaagaaatactgacttggtatagggtaccttagttttctctattcattagacaggtaaaattatatttcagctgattgatctgtgtgacaaaattatttcttagctataatcagcacatcacttagttcaaacaaaattccccagcaaatgttagatagtaggtatatcagtcacctggggagttttcttcataatatgcatattcatcttgtaatgcatacatagttatcatcctccttctcaacccatctccctaaccccacatgcttgccagttcttgaagggataaagtgattctaataatgttttacttctctctgttcaatttaatgtgatataattctagtataaaaatattttggacagttgcttaacatggtcataagaggatttgtactatagaatatcttctagtactaatttttctgtagagcaaattatatttctctcactggatagtttttagatgtgtttcttcatataaaattaaaaactgagatggaattcaaaaaaaaaaaaaaaaaaaaaa

SEQ ID NO: 246 - DNA, 1398 bp, HOMO SAPIENS
ggccctcgcggggggcttgtgggtcctcctccccctcccactgacaactgccccaactgctcttcccgccccggtcacagtgaaaatgtagacggggtcgttgtccactatgttaggtcttaatggtgggaggacgcccgagtgctcggcccgtttcaccccgaggaggaaggacactgggtcatgacgccatcagagggcgccagagcagggaccggacgcgagttggagatgttggactcgctgttggccttgggcggcctggtgctgcttcgggattccgtggagtgggaggggcgcagtctcttgaaggcgcttgtcaagaaatctgcactgtgtggggagcaagtgcatatcctgggctgtgaagtgagcgaggaagagtttcgtgaaggttttgactctgatatcaacaatcggctggtttaccatgacttcttcagagaccctctcaactggtcaaaaactgaggaggcctttcctggggggccgctgggagccttgagagccatgtgcaagaggacagatcctgttcctgtcaccattgctctcgattcactcagctggctgctacttcgccttccctgcaccacactctgccaggtcctgcatgctgtgagccatcaggactcttgtcctggtgacagctcctcagtggggaaagtgagtgtgctgggcttgctacatgaagagcttcatggaccaggccctgtgggagctctcagcagccttgctcagactgaggtgaccctgggcggtaccatgggccaggcctcggcccacatcctgtgtcggaggccccgacagcgcccaactgaccagactcagtggttctccatccttccggacttcagcctggatctccaagaggggccctctgtagagtcccagccctactccgatcctcatatacccccggtggatcccacaactcatttgacctttaaccttcacctgtccaagaaagagagagaagccagagatagcctgatcctgcccttccagttcagttctgaaaaacagcaggctctcctgcggcctaggccagggcaggctaccagccacatcttctatgagccagatgcttatgatgacctggaccaagaagacccagatgacgacctggatatttgactggccagatttgattagattgtaattggagggggcgcgggaagactttgggcccagaaccatctttctattgtttgtgttagccttaccctgtccctgccccaccttggttccccttgtctatggagccccgccttgtgagccaggaagcagcgtctcatcaggacagaaggtaggatgaagacatggggtaatgtgagagagtagaacacccccgtacctaataaaaatctttatttttttattaaaaaagaaaaacaaaaa

SEQ ID NO: 247 - DNA, 1118 bp, HOMO SAPIENS
ctcggtaactgggttgcaggcccgcggctgcggagtgcgcaggcgcgccgagatggccgcgctcctggccgcctagagccggagcggcccgcggagctgcggaggcagccatggtcggggcgctgtgcggctgctggttccgcctgggcggggcccgcccgctcatcccgttgggcccgactgtggtacagacctccatgagccggtcccaggtagccctgctgggcctgagtctgctgctcatgctcctactgtatgtggggctgccaggcccccctgagcagacttcctgcctctggggagaccccaatgtcacagtcctggctggtctcacccctggcaactcgcccatcttttaccgcgaggtgctcccactcaaccaggcacacagggtggaggtggtgctgcttcatggaaaggcctttaactctcacacgtgggagcagctgggcacactgcagctactgtcacagaggggctaccgggccgtggcccttgaccttccaggttttgggaactcggcaccttcaaaggaggcaagcacagaggcagggcgggcagcgctgctggagcgggcgctgcgggacctggaggtacagaatgccgtgttggtgagcccctcgctgagtggccactatgccctgcccttcctgatgcgaggccaccaccagctacatggatttgtgcccatcgcacccacctccacccagaactacacccaggagcaattctgggctgtgaagactccaacccttatcctgtatggagagctggaccacatcctggctcgagagtcactgcggcagctccgccacctgcccaaccactctgtggtgaagctacgcaatgcaggccatgcctgttacctccacaagccgcaagacttccaccttgtcctgcttgccttccttgaccatctaccttgaactaacccactcccagctcccagcctggcatgagcttggacagtctggaccgccaccctccctgaaccagggagacagcctctgggattggaggccagaggccagggtcagacccagccaggactcctcatttcatctcacagacacaataaaaaagcatatttgtcctgcctgggaagtgaaaaaaaaaaa

SEQ ID NO: 248 - DNA, 6028 bp, HOMO SAPIENS
ggtgtggacgttgtctaaatttcggtagccatggcacaagaatataagaaagcatgggattatggcaaccacagaatctcagtagtacaagttccattcagttttttctgaaagaaagccctctgttaaagtgaagcaaagaaactgttgtggattataacgtttagaagttccaatttttcagtgctttacaaataaagcatcatttaaccttttaaatgaaaaagattaagatctcatgcaactgttgtattttctggaagccattctccaaaagggaagtgcacatttaaaacacagatatgatggtccttgctgcagggatttaagtctacttgcttttacatcatgaccagcttgaaacggtcacagacagaaaggcctcttgccactgacagggcctctgttgttggcacagacggcacccccaaagtccacactgatgatttctacatgcggcgcttccggtcccaaaatggcagcttaggatcatcagttatggctcctgtaggacccccccgaagtgaaggttctcaccatataacctcaacccccggagtcccaaaaatgggggtaagggcaaggattgcagattggcccccaagaaaggaaaacataaaagaatctagccgttcaagccaggaaatagaaacctcaagttgccttgatagcctgtcctccaaaagcagtcctgtgagtcagggaagttctgttagcctcaattccaatgactcagccatgctgaaaagcatacagaacacgctgaaaaacaagacaagaccgtcggagaacatggactccagatttctcatgcctgaagcctaccccagctcccccagaaaagctcttcgcagaatacgccagcgaagcaacagtgatatcaccataagtgaacttgatgtggatagctttgatgaatgtatctcacctacatacaagactggaccatcactgcacagggaatatggtagcacatcttcaattgataaacagggaacatctggagaaagcttttttgatttgttaaagggctacaaagatgacaaatctgatcgaggtccaactccaaccaagctcagtgactttctcattactggtggtggcaagggttctggtttctctttggatgtaatagacgggcctatctcacagagagagaacctcaggctttttaaggaaagggaaaaaccactcaagcgacgttcaaaatctgaaactggagactcctctatttttcgtaaattgcgcaatgccaaaggtgaagaacttgggaagtcatcagatcttgaagataaccgatcagaagactctgtcaggccctggacatgtccaaagtgctttgcccactatgatgtccagagtatattatttgatttgaatgaggcaattatgaacaggcacaatgttattaagaggagaaacaccaccactggagcttccgcagctgccgtggcatccttggtctctggacctctgtctcattcagccagttttagctccccaatgggcagcacagaggacctgaattccaaaggaagcctcagcatggaccagggagatgataaaagcaatgagcttgtaatgagctgtccatattttcggaatgagataggtggagaaggggagaggaaaatcagcctttcaaaatcaaattctggctcctttagtggatgtgaaagtgcctcctttgagtctacccttagttcccattgcacaaatgcaggagtggcagtacttgaagtgcccaaggagaacttggtgttgcacctagatagagtgaaaagatacatcgtggaacacgtagatctgggtgcatactattatagaaaatttttctaccagaaggaacactggaactattttggggctgatgagaatcttggtccagtggctgtgagcattcgaagggaaaaaccagatgaaatgaaagaaaatggatctccgtacaactaccgaataatttttagaactagtgagctcatgacactgagaggttcggtcctggaggacgccattccgtcgacagccaagcactcgacagccagaggcctgcctctcaaagaagtgctggagcacgtggttcctgagctcaatgtccagtgcctgcggttggccttcaacacacccaaggtcacagagcagctcatgaaactggatgaacaagggctgaactaccagcagaaagtaggcatcatgtactgcaaagctggacagagcactgaagaagagatgtacaacaatgagtcagctggcccagcctttgaagaattccttcaactattgggagagcgagttcggctcaaaggatttgagaagtatcgagcacagcttgataccaaaactgactccactggaacccattctctgtacacaacatacaaagattatgaaattatgttccatgtttctaccatgctgccatacacacccaacaacaaacaacagctcctgaggaagcggcacattggaaatgatatcgtaacaattgttttccaagagcctggagcacagccattcagcccaaaaaacatccgatcccacttccagcacgttttcgtcatcgtcagggtgcacaatccgtgctctgacagtgtctgttatagtgtggctgttaccaggtccagagatgtgccttcctttgggcctcccattcctaaaggggtcactttccctaagtcaaatgtgttcagggacttccttttggcgaaagtgattaatgcagaaaatgctgctcataaatcggagaagtttcgggccatggcaactcggacccgccaggaatacctgaaagatctggcagaaaagaatgtcaccaacacccctatcgacccttctggcaagtttccgttcatctctctggcttccaagaagaaggaaaagtctaagccatatccaggagccgagctcagcagcatgggggccattgtatgggcagtccgggctgaagactacaacaaggccatggaactagactgccttttagggatctccaatgagttcattgtgctcattgaacaggaaacaaagagcgtggtcttcaattgttcctgtagagatgtgatagggtggacttcaactgacaccagcctcaaaatcttctatgaacgaggagaatgtgtttcagtgggtagttttattaacattgaggagatcaaagagattgtcaaaaggttgcagtttgtttcaaaaggctgtgaatcggtggagatgactctgcgaagaaatgggctaggacagcttggcttccatgtcaactatgagggcattgtggcggatgtggagccctacggttatgcctggcaggcagggctgaggcagggcagtcgcctggtggagatctgcaaggtggcggtagccactctgagccatgagcagatgatcgacctcctgagaacatctgtcacggtgaaggttgtcatcattcccccgcatgatgactgcaccccgcggaggagttgctctgaaacctaccgcatgccagtgatggagtacaaaatgaatgaaggtgtttcatacgaattcaagtttcccttccgaaataataacaagtggcagaggaacgccagcaaggggcctcattcacctcaagtcccgtcccaggtgcagagtcccatgacctcgcggctgaatgctggaaaaggagatgggaagatgcctcctccagaaagagccgccaacatccctcgaagcatctccagtgacgggcgcccactagagaggcggctgtctcctggttcggacatctatgtgacggtctcatccatggctttagcaagatcccagtgtcggaactctcctagcaacttgtcttcatccagtgatactggttctgtggggggcacttacaggcagaagtccatgcccgaagggtttggagtgagccgtagatccccagcctccattgacaggcagaacacccagtcagatattggtggcagcggaaaatccacgcctagctggcaaagaagtgaggatagcattgctgaccagatggcttacagttatagaggacctcaggatttcaattcttttgtcctcgagcagcatgaatatacagagccaacatgccatctcccagcagtatcaaaggtactgccagctttccgagagagccccagtgggagattaatgcggcaggatccagtggttcatttgtctccaaacaaacaagggcattctgatagccactactcgagccactccagtagcaatactctctccagcaatgcgtcaagtgcccatagtgatgagaagtggtacgatggggaccgcacagaatccgaactcaacagctataactatctgcaaggcacctctgctgacagtggcattgacaccacctcttatggccccagccacggcagcacagcctcgctgggggctgccacatcgtcacctcgctcagggccaggcaaggagaaagtggcacccctatggcacagctccagtgaagtaatctccatggcagatcggactttggagacagagagccacggcctggaccggaaaacagagtcttccctgagcttagacatacacagcaagagccaagccggctcgacccctctgacaagggagaacagcaccttcagtataaacgatgctgcttcccacacaagtaccatgagctcccgacactctgccagcccagtggttttcaccagtgcccggagttcacctaaagaagagcttcatccagctgccccctcacagctcgcaccatccttctcctcctcttcctcctcctcctctggtcctaggagtttttaccctcgccagggcgctactagcaagtacctgattggatggaaaaaacccgaaggaaccataaactccgtgggatttatggacacgagaaagcgtcatcagagcgatggcaatgaaatagcccacaccaggctgcgtgcctcaaccagagacctccgggcatctcctaagccaacctccaagtccaccattgaagaagatctaaagaaactaattgatcttgaaagcccaactcctgaatcacagaagagttttaagttccacgcactctcctctcctcagtctcctttccccagcacccccacctcacggcgggccttgcacagaacactgtcggacgagagcatttacaatagccagagggagcactttttcacctccagggcgtcacttctggaccaagccctgcccaacgacgtcctcttcagtagcacgtacccttctctccccaagtcgctcccgttgaggaggccttcttacaccttaggaatgaaatcgctgcatggagagttctcagcctcggacagctccctcactgacatccaggagacccgcaggcagcctatgcccgaccctggcctgatgcccctgcctgacactgctgcagacttggattggtccaacctggtagatgctgccaaagcctatgaggtccagagagcctcattttttgctgctagtgatgaaaaccatcgccccttgagtgctgcatccaacagtgatcagctggaggaccaggctctggcccagatgaagccttacagcagcagtaaagactcctctcccactctggcttctaaagtggaccagctggaaggtatgctgaagatgcttcgggaagatttgaagaaggaaaaagaagacaaagctcaccttcaggcggaggtgcagcacctgcgagaggacaacctgaggctacaggaggagtcccagaacgcctcggacaagctgaagaagttcacagaatgggtcttcaacaccatagacatgagctagggaaggctgaggaggacaggagaagggcccagacactccctccagtgagtgtcctgcagcccttattccctccatagaaagcatcctcagagcaccttccctggcttcctactctgccccctttcggggagtgcacaacacaatagttgcagatcaacaatcatcacctgccttttgtagaaaagaaaaacaaaaaaagtaaataaaaattttaaacagtaaaataaaagtttaactgctaaaaaaaaaaaaaaaaaaaaaaaaa

SEQ ID NO: 249 - DNA, 1805 bp, HOMO SAPIENS
ggcctccttgtccgcggggcggggcagcgcgccttcctcttcctgggcagcctcgggacggggcgccgcggccgggcgggcagcatgaataaccctataccttccaatttgaaatcagaagcaaaaaaggctgccaaaatattaagagaattcacagaaataacttccagaaatggacctgataagatcattcctgctcacgtaattgcgaaggctaaaggccttgcaattctgtctgtgatcaaagccgggttcctggtgactgccagaggaggcagcgggattgtagtggcgcgccttccagatggaaaatggtctgcaccctcagccattgggatagctggccttggtggaggatttgaaataggaattgaggtatcagacttggtgataattctgaattatgaccgtgctgtagaagcttttgcaaaaggcggaaatctgaccctcggagggaacttgactgtggcggttgggcccttgggaaggaacttggaaggaaacgtggccctgagaagctccgctgccgtcttcacgtactgcaagtcaaggggactctttgcaggcgtgtctttagaagggagctgtttgattgaaaggaaagaaactaatagaaaattttattgtcaagatatccgagcttatgacattttatttggagatacaccgcggcctgctcaagccgaagatctttatgaaattcttgattcctttactgaaaagtatgaaaatgaaggacaacgaatcaatgcaagaaaagcagcaagggagcagaggaagtcttctgctaaagaattacctccaaagccattgtcaagaccacagcagtcatctgcaccagtccagctgaactctggctctcaaagtaacagaaatgaatataagctctatcctggactttccagctatcatgagagagttggcaatttgaatcaacccatagaagtgacagcgctgtattcatttgaaggacagcagcctggggatttgaattttcaagctggagacagaatcacagttatatcaaaaacagattcacattttgattggtgggaaggaaaacttcgaggtcaaactggcatttttccagccaactacgtaaccatgaattaaagcgtatactattttcttctttgagaattacaaaaaaattatttctacactgacaggatttactagttaagcaatgtttaatataaattttaaaaaacttctgttctacaaaatttccattccgtatgtaaaagattttgtttttctatataaaaagagctgactgacatatctttaaatactttgtactaactttatcacacttactgtgtcatagaatatcatacagtttatacgctcatagttctcttgtgaacacttcaaacatcgctaagcatttgatctggccatgtatatggtagctgtgttttaatttgagaatcttgagggtagagccacaaatttcaattcttacatttccatttgcaaagtgactagagaaaaagaaatcagcttaaatgaggtattaagtaatgtttagagtcgtaggtattaactagaatataaatccttagaaattgtctttataccttcaaaaattatactatgcatttatcatagaaatgtgattacaaagaagtctgactaccatgtctttaaacatatggcatctctcaacttttcttccttatggggctacatttgttcatttccagcagtagcataaacttacggtgacatggtagacttgtctctaaataaaatttttaaatgtttactaagttaatatttcaaaaaaaaaaaaaaaaaaa

SEQ ID NO: 250 - DNA, 2787 bp, HOMO SAPIENS
ttgtacaggtagccaggtgtcggtctccagcctgagaactctggctgttgttccttgtgtcgtcccatattcctgcctggcctgcgatggacatcagcaagggcctcccaggcatgcagggaggcctccacatatggatctctgagaaccggaagatggtgccggtacccgagggggcttacgggaacttttttgaggaacactgctatgtcatcctccacgtcccccagagcccgaaggccacgcagggggcgtccagcgacctgcactactgggtcgggaagcaggcgggtgcggaagcgcagggcgctgcggaggccttccagcagcgcctacaggacgagctggggggccagaccgtgctgcaccgcgaggcgcagggccacgagtccgactgcttctgcagctacttccgcccgggaatcatctacaggaagggaggcctagcatctgacctcaagcatgtggagaccaacttgttcaacatccagcgactgctgcacatcaaagggaggaagcacgtgtctgccactgaggtggagctctcctggaacagctttaataagggtgacatcttcctgctggacctaggcaagatgatgattcagtggaatgggcccaagaccagcatttctgagaaggctcgggggctggctttgacctacagcctccgggacagggaacgtggtggtggtcgtgcacagattggtgtggtggatgatgaggccaaagccccggacctcatgcagatcatggaggctgtgctgggccgcagggtgggcagcctgcgtgccgccacgcccagcaaggatatcaaccagctgcagaaggccaatgttcgcctgtaccatgtctatgagaagggcaaagacctggtggtcctggagttggcgacccccccactgacccaggacctgctgcaggaggaggacttctacatcctggaccagggtggcttcaagatctatgtgtggcagggacgcatgtctagcctccaggagagaaaggctgccttcagccgggctgtgggcttcatccaggccaagggctacccgacctacaccaacgtggaggtggtgaacgacggcgccgagtcggccgcgttcaagcagctcttccggacttggtctgagaagcggcgcaggaaccagaagctcggcgggagggataaatcgattcatgtaaagctggacgtgggcaagctgcacacccagcctaagttagcggcccagctcaggatggtggacgacggctctgggaaggtggaggtgtggtgcatccaggacttacacaggcagcccgtggaccccaagcgtcatggacagctgtgtgcaggcaactgctaccttgtgctctacacataccagaggctgggccgtgtccagtacatcctgtacctatggcagggccaccaggccactgcggatgagattgaggccctgaacagcaacgctgaggaactagatgtcatgtatggtggcgtcctagtacaggagcatgtgaccatgggcagcgagcccccccacttcctcgccatcttccagggccagctggtgatcttccaggagagagctgggcaccatggaaaggggcagtcagcatccaccacaaggcttttccaagtgcaaggcactgacagccacaacaccaggaccatggaggtgccagcccgtgcctcatccctcaactccagtgacatcttcttgctggtcacagccagcgtctgctacctctggtttgggaagggctgtaatggtgatcagcgtgagatggcacgggtggtggtcactgtcatttccaggaagaatgaggaaacggtgctggagggtcaggagcctccccacttctgggaggccctgggaggccgggccccctaccccagcaacaagaggctccctgaggaggtccccagcttccagccacgactgtttgagtgctccagccacatgggctgcctggtcctcgcagaagtggggttcttcagccaggaggacctggacaagtatgacatcatgttactggacacctggcaggagatcttcctgtggcttggggaagctgcaagtgagtggaaggaggcggtggcctggggccaggagtacctgaagactcacccagcagggaggagcccggccacacccatcgtgctggtcaagcagggccatgagcctcccaccttcattggatggttcttcacttgggacccctacaagtggactagccacccgtcccacaaggaagtggtggatggcagcccggcagcagcatcaaccatctctgagataacagcagaagtcaacaacttgcggctatccagatggccgggcaatggcagggcaggtgccgtggccctgcaggccctcaagggctcccaggacagctcagagaatgatctggtgcgaagccccaagtcggctggcagcagaaccagcagctccgtcagcagcaccagcgccacgatcaacgggggcctgcgccgggaacaactgatgcaccaggctgttgaggacctgccagagggcgtggaccctgcccgcagggagttctatctctcagactctgacttccaagatatctttgggaaatccaaggaggaattctacagcatggccacgtggaggcagcggcaggagaaaaagcagctgggcttcttctgaacccaagccctctcgactgcccctatcccctggaccccaacatacctacaatgctggggaggccctgcttccactcccctcagaggcttttggtcatcctctgcgtgtcagtaaaagcaggcagcccata

SEQ ID NO: 251 - DNA, 1383 bp, HOMO SAPIENS
gtggctccaggccggaagagggagtctgtaggggcgggccggctggcgtcccctttccggccggtccccatggaggcgctggggaagctgaagcagttcgatgcctaccccaagactttggaggacttccgggtcaagacctgcgggggcgccaccgtgaccattgtcagtggccttctcatgctgctactgttcctgtccgagctgcagtattacctcaccacggaggtgcatcctgagctctacgtggacaagtcgcggggagataaactgaagatcaacatcgatgtactttttccgcacatgccttgtgcctatctgagtattgatgccatggatgtggccggagaacagcagctggatgtggaacacaacctgttcaagcaacgactagataaagatggcatccccgtgagctcagaggctgagcggcatgagcttgggaaagtcgaggtgacggtgtttgaccctgactccctggaccctgatcgctgtgagagctgctatggtgctgaggcagaagatatcaagtgctgtaacacctgtgaagatgtgcgggaggcatatcgccgtagaggctgggccttcaagaacccagatactattgagcagtgccggcgagagggcttcagccagaagatgcaggagcagaagaatgaaggctgccaggtgtatggcttcttggaagtcaataaggtggccggaaacttccactttgcccctgggaagagcttccagcagtcccatgtgcacgtacatgctgtggagatccatgacttgcagagctttggccttgacaacatcaacatgacccactacatccagcacctgtcatttggggaggactatccaggcattgtgaaccccctggaccacaccaatgtcactgcgccccaagcctccatgatgttccagtactttgtgaaggtggtgcccactgtgtacatgaaggtggacggagaggtactgaggacaaatcagttctctgtgaccagacatgagaaggttgccaatgggctgttgggcgaccaaggccttcccggagtcttcgtcctctatgagctctcgcccatgatggtgaagctgacggagaagcacaggtccttcacccacttcctgacaggtgtgtgcgccatcattgggggcatgttcacagtggctggactcatcgattcgctcatctaccactcagcacgagccatccagaagaaaattgatctagggaagacaacgtagtcaccctcggtgcttcctctgtctcctctttctccctggcctgtggttgtcccccagcctctgccaccctccacctcctcggtcagccccagccccaggttgataaatctattgattgattgtgatagtaaaaaaaaaaaaaaaaaa

SEQ ID NO: 252 - DNA, 1243 bp, HOMO SAPIENS
gggcggtggcgggcgctggtgaaggagtctcgctgagctcgaggaggtggcgcgatggagggactggaagagaatggaggtgttgtccaagttggagaattgttaccttgcaagatttgtggaagaacattctttccagtagcattaaaaaaacatggacccatttgccagaagactgcaactaaaaaacggaagacttttgattcaagcagacagagagctgaaggaactgatattccaacagtaaaacctctcaaaccgaggccagaaccaccaaagaaaccatctaattggagaaggaaacatgaagaattcattgctaccataagagcagctaaaggccttgatcaggccctcaaagagggtggcaaacttcctcctcctcctccaccttcttatgatcctgattatattcaatgtccatattgtcagaggagattcaatgaaaatgcagctgatagacatataaatttctgtaaagaacaggcagcacgtattagtaatgaaggggaattttctacagataccaaaggaaaaccatcttctcggacacaggtgtataagccacccgcacttaaaaagtcaaattctcctggaactgcatcatcaggatcttcacgattaccgcagccaagtggcgctggcaaaactgttgtaggtgttccttcaggtaaagtgtcttcaagtagcagctctttgggaaacaaacttcagaccttgtctccctctcataaagggatagcagcccctcatgcaggagctaatgtcaaaccccgaaattccacaccacctagtttggcaagaaatcctgccccaggtgtgcttacaaacaaaagaaaaacatatactgagagctacatagccaggccagatggggactgtgcatcttcccttaatggtggaaatattaaaggcattgaaggacattcacctggaaacttaccaaaattctgccatgagtgtgggactaaataccctgtagaatgggccaaattttgctgtgaatgtggcattcgaagaatgattctatgaatagaatctcaaaaaaaaaaaaaagccaagttcagagtttatgattattgctgcttggacagctagagcacatcctctagttagtttgtgctaaaaatactcgaaataccatttccagttaattttgaagtgtaatcttttggctatataatgtgtgtatgtttatatgtgtacatatactgtatataataaatatttgataccccaaaaa

SEQ ID NO: 253 - DNA, 5595 bp, HOMO SAPIENS
tcccccaggtaagccggtttccccacgccaaggcgcagtcgctcaccacccaaatcgtcgctggggagagacccacccggcgactgcgcgcttcgcactcgagtctgcgttaggaagcctctgaccctttcccgggcccctgcgcgtggaagcctcggacacaactcggagaaccagcgaaccccggcagcacagaattcgaaccgccgcgggagccgttgggacgcgcctacccggtcactgccccgccccggcgcagactgcgtgaggcgccgccggaggcgcggggcttgccggggatcgtggtcggcgagcgcgcccgagcccactagcggagcccgcccgggactacatttcccacaattaccgccatgatgcccattggtgggggaagccatgggaaccggaggccgtcagggggagaggcgggcggcgctcacgcctggcctgagggggccgagactgaggcggttgcggaataggactgctagccccgcccagagtccctaccctttggagaactgcgcttctctttcggagggagtgttcgccgccgccgcggccgccacctggagtttcttcagactccagatttccctgtcaaccacgaggagtccagagaggaaacgcggagcggagacaacagtacctgacgcctctttcagcccgggatcgccccagcagggatgggcgacaagatctggctgcccttccccgtgctccttctggccgctctgcctccggtgctgctgcctggggcggccggcttcacaccttccctcgatagcgacttcacctttacccttcccgccggccagaaggagtgcttctaccagcccatgcccctgaaggcctcgctggagatcgagtaccaagttttagatggagcaggattagatattgatttccatcttgcctctccagaaggcaaaaccttagtttttgaacaaagaaaatcagatggagttcacactgtagagactgaagttggtgattacatgttctgctttgacaatacattcagcaccatttctgagaaggtgattttctttgaattaatcctggataatatgggagaacaggcacaagaacaagaagattggaagaaatatattactggcacagatatattggatatgaaactggaagacatcctggaatccatcaacagcatcaagtccagactaagcaaaagtgggcacatacaaactctgcttagagcatttgaagctcgtgatcgaaacatacaagaaagcaactttgatagagtcaatttctggtctatggttaatttagtggtcatggtggtggtgtcagccattcaagtttatatgctgaagagtctgtttgaagataagaggaaaagtagaacttaaaactccaaactagagtacgtaacattgaaaaatgaggcataaaaatgcaataaactgttacagtcaagaccattaatggtcttctccaaaatattttgagatataaaagtaggaaacaggtataattttaatgtgaaaattaagtcttcactttctgtgcaagtaatcctgctgatccagttgtacttaagtgtgtaacaggaatattttgcagaatataggtttaactgaatgaagccatattaataactgcattttcctaactttgaaaaattttgcaaatgtcttaggtgatttaaataaatgagtattgggcctaattgcaacaccagtctgtttttaacaggttctattacccagaacttttttgtaaatgcggcagttacaaattaactgtggaagttttcagttttaagttataaatcacctgagaattacctaatgatggattgaataaatctttagactacaaaagcccaacttttctctatttacatatgcatctctcctataatgtaaatagaataatagctttgaaatacaattaggtttttgagatttttataaccaaatacatttcagtgtaacatattagcagaaagcattagtctttgtactttgcttacattcccaaaagctgacattttcacgattcttaaaaacacaaagttacacttactaaaattaggacatgttttctctttgaaatgaagaatatagtttaaaagcttcctcctccatagggacacattttctctaacccttaactaaagtgtaggattttaaaattaaatgtgaggtaaaataagtttatttttaatagtatctgtcaagttaatatctgtcaacagttaataatcatgttatgttaattttaacatgattgctgacttggataattcattattaccagcagttatgaaggaaatattgctaaaatgatctgggcctaccataaataaatatctccttttctgagctctaagaattatcagaaacaggaaagaatttagaaaaacttgagaaaacctaatccaaaataaaattcacttaagtagaactataaataaatatctagaatctgactggctcatcatgacatcctactcataacataaatcaaaggagatgattaatttccagttagctggaagaaactttggctgtaggtttttattttctacaagaattctggtttgaattatttttgtaagcaggtacattttataaaatgtaagccctactgtaaggtttagcactgggtgtacatatttattaaaaatttttattataacaacttttattaaaatggcctttctgaacactttatttattgatgttgaagtaaggattagaaacatagactcccaagttttaaacacctaaatgtgaataacccatatatacaacaaagtttctgccatctagctttttgaagtctatgggggtcttactcaagtactagtaatttaacttcatcatgaatgaactataatttttaagttatgcccatttataacgttgtttatgactacattgtgagttagaaacaaacttaaaatttggggtatagaacccctcaacaggttagtaatgctggaattcttgatgagcaataatgataaccagagagtgatttcatttacactcatagtagtataaaaagagatacatttccctcttaggcccctgggagaagagcagcttagatttccctactggcaaggtttttaaaaatgaggtaaatgccgtatatgatcaattaccttaattggccaagaaaatgcttcaggtgtctaggggtatcctctgcaacacttgcagaacaaaggtcaataagatccttgcctatgaatacccctcccttttgcgctgttaaatttgcaatgagaagcaaatttacagtaccataactaataaagcagggtacagatataaactactgcatcttttctataaaactgtgattaagaattctacctctcctgtatggctgttactgtactgtactctctgactccttacctaacaatgaatttgttacataatcttctacatgtatgatttgtgccactgatcttaaacctatgattcagtaacttcttaccatataaaaacgataattgctttatttggaaaagaatttaggaatactaaggacaattatttttatagacaaagtaaaaagacagatatttaagaggcataaccaaaaaagcaaaacttgtaaacagagtaaaaatctttaatatttctaaagacatactgtttatctgcttcatatgctttttttaatttcactattccatttctaaattaaagttatgctaaattgagtaagctgtttatcacttaacagctcattttgtctttttcaatatacaaattttaaaaatactacaatatttaactaaggcccaaccgatttccataatgtagcagttaccgtgttcacctcacactaaggcctagagtttgctctgatatgcatttggatgattaatgttatgctgttctttcatgtgaatgtcaagacatggagggtgtttgtaattttatggtaaaattaatccttcttacacataatggtgtcttaaaattgacaaaaaatgagcacttacaattgtatgtctcctcaaatgaaaattctttatctgaaattttaaaagacattgattccgcatgtaaggatttttcatctgaagtacaataatgcacaatcagtgttgctcaaactgctttatacttataaacagccatcttaaataagcaacgtattgtgagtactgatatgtatataataaaaattatcaaagaaaattaactgccagtcatttgtaaatgctgtctactcctgaaagccttccttcatctctatttagttaataatgtgctctctcctcctgttttgaaaccccatagctctctacacctcttattgtacatcactctactttgcattggagttctgtttctatatgtacttattcacctgttgcctaaacatgcactgttcctaaaaggtacagtttttgctcaaaatatatgaaaggaaagataatcagttcttaaagtttggtatgctaaataagcacccagggaacttacctgctccacctcaccccagaaattgattattcaggtctggaatatggctcaggattcttaattttcaaccaacacaatatagaatcctgtcagttatccttggatcatttgctaagtgatcttgcaaaatcaaaactcctttgagactatttcattttcagaaatattttaaaacttgttcagaaacatcttaaaacttgttagcatataggaaaagtacaatgcttggtgtaggtaggttattatttggtcatttccctcaaaccatccagacaagccactcttctaccacaagctggtagaaatccttaggcacctttctgcttctgcactgctatcactttcaggtgtctaaggcttctggaaggctgttgtcataacctggagccatacacctaatgtacgtctggggaaaggacaccaattaaagaatctagagctaggatgatgttacataagacagggcacaatggagatggactctggatccctgcatctgaaagaaaaaggcaagaaaatgcagggcagggaaaatcctgaaggtcttcactgaccatgaattaaaatcctaattgacagttttacaaacaaaaaccctcgttttagtacttgtgttgtttttgtttctgttttaacaagcttagatttattattgtgccttttatggaagatgaggaagaaataggaaagcagtaaaatgaacaatgagaatctgttacccaaactgatataaactccctcagaaagaaagatactactccctaatcctggaagtgttaagtggcaataatgatcaaatgttgtaaaggggattgttactacagctaatatgaaatgggaggctggactaaatctaacctttctacccttgatttcaattctaaaaggacacgtaataccattgcagaaagaaaagacagttccaaatgataaattttagagttgttttgctaggatgcaagagaaattggataagtggaccactcatacgttgctggtgagatatgaaatagtagagccactgtggaaaatattcttggcagtttcttataaaactaaacatacatttaacatataactggcatttgtactacttgacagttatccctga

SEQ ID NO: 254 - DNA, 785 bp, HOMO SAPIENS
ccggaagtggttctccgcccctgccactgggccatggagactgtggcacagtagactgtagtgtgaggctcgcgggggcagtggccatggaggccgtgctgaacgagctggtgtctgtggaggacctgctgaagtttgaaaagaaatttcagtctgagaaggcagcaggctcggtgtccaagagcacgcagtttgagtacgcctggtgcctggtgcggagcaagtacaatgatgacatccgtaaaggcatcgtgctgctcgaggagctgctgcccaaagggagcaaggaggaacagcgggattacgtcttctacctggccgtggggaactaccggctcaaggaatacgagaaggccttaaagtacgtccgcgggttgctgcagacagagccccagaacaaccaggccaaggaactggagcggctcattgacaaggccatgaagaaagatggactcgtgggcatggccatcgtgggaggcatggccctgggtgtggcgggactggccggactcatcggacttgctgtgtccaagtccaaatcctgaaggagacgcgggagcccacggagaacgctccaggagggcctgtccatcctcgctgtcctttccctgttctccccctgccccccgtctctatcctctgtggccttcagctaatttctgctcccctgagattcgtccttcagccccatcatgtgctttgggatgagtgtaaataaaacggggctgtggcttgggaaaaaaaaaaaaaaaaaaaaaaaaaaaaaaaaaaaaaaaaaaaaaaaa

SEQ ID NO: 255 - DNA, 1278 bp, HOMO SAPIENS
ggaggggcccgagtttctgcgaagccgcgacctcggcgtccggacgcggggaacaccgggctgagggagtctgcagtcggctccgggaagccgcgcggcgacgggggaggccttcactaaaggggaaaaggaagagggggtcggccagtatccccgaaagagggctagggcgcatgaagaccagcgcagagctccacgagcaggaaaagcccccaagcagccccagggcgactggaccgggccgcttaggccacgcccggggaagagggcctgacgcgctgcggggcggggccgcggggccgggtcgcgcgagcagcggagcaccaagggaacggaaaatggcgcctcacgacccgggtagtcttacgaccctggtgccctgggctgccgccctgctcctcgctctgggcgtggaaagggctctggcgctacccgagatatgcacccaatgtccagggagcgtgcaaaatttgtcaaaagtggccttttattgtaaaacgacacgagagctaatgctgcatgcccgttgctgcctgaatcagaagggcaccatcttggggctggatctccagaactgttctctggaggaccctggtccaaactttcatcaggcacataccactgtcatcatagacctgcaagcaaaccccctcaaaggtgacttggccaacaccttccgtggctttactcagctccagactctgatactgccacaacatgtcaactgtcctggaggaattaatgcctggaatactatcacctcttatatagacaaccaaatctgtcaagggcaaaagaacctttgcaataacactggggacccagaaatgtgtcctgagaatggatcttgtgtacctgatggtccaggtcttttgcagtgtgtttgtgctgatggtttccatggatacaagtgtatgcgccagggctcgttctcactgcttatgttcttcgggattctgggagccaccactctatccgtctccattctgctttgggcgacccagcgccgaaaagccaagacttcatgaactacataggtcttaccattgacctaagatcaatctgaactatcttagcccagtcagggagctctgcttcctagaaaggcatctttcgccagtggattcgcctcaaggttgaggccgccattggaagatgaaaaattgcactcccttggtgtagacaaataccagttcccattggtgttgttgcctataataaacacttttttctttttttttcctctctttctttttaaaaaaaaaaaaaaaaaaaaaa

SEQ ID NO: 256 - DNA, 3968 bp, HOMO SAPIENS
agtcgggcgggcggggaagtgcgggccgggtcaactgtcaccggctgcacccgggcttcagcgcctcgctcccgcccctggtaaacttcctgttgtcgggaggcagataccagctttgtgaccaattcaggaaaatgcctaactgatttctggttaggaattgggcggtcggagcgttctggagttcaatggaaccaccccaagcgcagactgcgtgcaggcgccgtagtcggcccgcaccggagggattcaaaggtgaagcgggccccggtcccctcccccgaggagcttaggctctggtgtgagagataagacgagaacacaaataactgcgataccgggaaggaggtgataagtcctgtgaaagaacgacggagtgctagaacggcacccggaaaaaccgaaccgatcacttctgcctcgcagaaacctggaaggcttcctgggcgggggatgctgagcagagtcttgaaggcctgatgggatttaggagaggaggattgcagaagaggtagcacaggcggagtgcagcggaggcccctgccgctgccgtcatgccgttcccgtttgggaagtctcacaaatctccagcagacattgtgaagaatctgaaggagagcatggctgttctggaaaagcaagacatttctgataaaaaagcagaaaaggctacagaagaagtttccaaaaatctggttgccatgaaagaaattctgtatggcacaaatgaaaaagagcctcagacagaagcagtagctcaacttgctcaagaactctataatagtgggctccttagcaccctggtagctgatttacagctcattgactttgagggcaaaaaagacgtggctcaaattttcaacaatattctcagaagacaaattggtacgagaactcctactgttgaatacatctgcacccaacagaatattttgttcatgttattgaaagggtatgaatctccagaaatagctctaaattgtggaataatgttaagagaatgcatcagacatgaaccacttgcaaaaatcattttgtggtcggaacagttttatgatttcttcagatatgtcgaaatgtcaacatttgacatagcttcagatgcatttgccacattcaaggatttacttacaagacataaattgctcagtgcagaatttttggaacagcattatgatagatttttcagtgaatatgagaagttacttcattcagaaaattatgtgacaaaaagacagtcactgaagcttctcggtgaactactactagatagacacaacttcacaattatgacaaaatacatcagtaaacctgagaacctcaaattaatgatgaacctgctgcgagacaaaagtcgcaacatccagtttgaggcctttcacgtttttaaggtgtttgtagccaatcctaacaagacgcagcccatcctagacatcctcctcaagaaccaggccaaactcatagagttcctcagcaagtttcagaacgacaggacggaggatgagcagtttaacgacgagaagacctatttagttaaacagatcagggatttgaagagaccagctcagcaagaagcttaatctccaataaacatctatgttaaatccaaattcagcatttgctgttagctattcagcatcaggcactcttattgattcatgaggaacattactgctaatctgctgttaagtgaacggtttttcattttacccttttgtttttcagtccaggttggagatcgtagctgctgctgcttgcacactagggcacatgtgggctttctcttgatctttgtgtcatttcagaattcaaagactgtgctacgggagttctgaacatggctgggttcatgaaggcaaatgtatggatgagagtgtggtttaggaaagagggcactgatatcagattagacctatgtgtttgcacccatctttgttggcgatctgagtgcagtgtggcaagtgcacacctggcatccctgcgtcagatcgcgcaccttcaggtcgcgcaccttcgctgaaggaagatgacgcagagctttatctgaaatcagaggggagctatccaaaatgggagtttgggggcagctaaagttgacatgcgaataaattgatactgaaacttagcaacttcttaaaagtgtaaagaagcctcataagatcataaggaaaatgtatatatgcttttcacagctttctagaattttttgacatttgattttcttgagacttgtaaacctggatatgttgaagggtatttgttaattttacttttcaaagatactttaaaacagtagagctagcaatgacaccttgcatttcatttcaacactgcttcaaggtttcttttgtatataattcttagaatgctcatttcttttaaatggtttaatttgtacagcagaggaatgttattgtagtagtatgtaactattacctaatactgagtttttgcaaaaaacaatgaatgctcatatgtaattgaaatacttcagatcacatgaaaatgctgatttaacatttaagtatcacagcattaaaagaaaaagaaagtaaaccagtcctttgtattcagttacctaatggggtgccatcaataagctgcgatacagccctggagctcagtcagccacaccttcctgcatcctattggccttattcattttaaatgagttaatgaatctgccagatctgtgaatgatagagattatgctaaattaatgctgattctttgtgtgtgtgggaaatctctgtagagcaccttttctttcttagactaagtaacccagtacaatagttgtgaactgaataattaaaactttggcttctcttaggaaaagacgacttcctagtcataggtgtcctatggggaaatttattttttttaatgtcctgttccttaatgctgcaaattatcagtatttataaagtaactgattttgcaccacttttttgttactgtgaccacggcagaacaatgtcttctagactatatctatgtaaagttattagaatggtatctgttcattttagtgatatgaagatcacaactaacaactgacaaatcagagtttgccagttcaaattcagcatggctgcagctgattaagaaattgatatgattattctttgctagcctctcttactaatggaattatatactggccagtaaaatgggcctcccaattgctgtttcagcaggttttaaaccttcaggaacaccagttaggaaaatagctccagaaaatatagatatattttatttttattaaaatggcagtctacatcataattggcatttctcaagactgtctttaccagaatctgtgtgaaataaggcaatctagtctccttgaaaaaaaaatctcttggatgtttaggaaggaagacttggccgtgatgtggtgtcctggctttgtggtgtagtgctgtgtgtatggagttagtgtaaaaacatggattacaccaagtggaagaaacgtcttcttgccaagctcattcttagaacttacacatctagaacagcttccactttggcagtgaggtcgtagccttttaggtggaagaagtgagggtgcagcgtgtcagacacaacattcatgttactcttacattggaatctgaaggtagttcagacttcgtgggttttgtttttaagcaaaacaatgtgaaaacatttaagtttgaaatgttgcatttgaagttatgatcatttaatatattcatattaccaagactattatactggaagtggtttttgtgttataaaggtttaattttacataaggcagttacttaatgtgatttttaacccttaaaaaagtggagatgtatacatttgttaacaatgccatgaaagcattttctttctcctaaggaaaagtgaatttcttatcagaatatctggctggccctgtaatttaaattaaaataaaattttggagaaacagcaaaaaaaaaaaaaaaaaa

SEQ ID NO: 257 - DNA, 1945 bp, HOMO SAPIENS
ggggaagcaactcggcagcggaccaagatggcggcgccctgtgagggacaagcgtttgccgtaggggttgaaaagaattggggtgcagtagttcgctccccagaagggaccccccagaaaatccggcagctgatagatgaggggattgccccggaagagggaggcgtggacgcgaaggacacgtctgccacatcccagtcagttaatggatcaccccaagcggaacaaccttcattggaatctacaagcaaagaagccttctttagcagagtggaaacattttcttctttgaaatgggcaggtaagccctttgagctgtctccactcgtctgtgcaaaatatggctgggtcacagtggaatgtgatatgctcaagtgctctagctgtcaagcttttctctgtgccagtttacaaccagcttttgactttgacagatataagcaacgatgtgctgagctgaagaaagccttgtgtactgcccatgagaagttctgtttctggccagacagcccatccccagaccgatttgggatgttgcccctggatgagcctgctattcttgttagtgaattcctagatcgttttcaaagcctttgtcacttggacctccagcttccttccctaaggccggaggacttgaaaactatgtgcttgacagaagacaagatcagtcttctcctacacttgcttgaagatgaacttgatcaccgaactgatgagagaaaaactacaatcaaattaggctcagacatccaagtccacgtcactgcctgtattctctctgtgtgtggctgggcgtgtagttcctctttggaatccatgcagctctccctgataacatgttcgcaatgtatgaggaaggtggggctctggggcttccagcagattgaatcgtccatgactgacctggatgcatcctttggcctgaccagctccccaatcccaggccttgaggggcgaccagagcgcttacctctggtgcctgaatctcctcggaggatgatgacccggagccaggatgccactttctccccaggctcagagcaggctgaaaagagccctggtcccattgtctctcgaactcggagctgggactcttccagtcctgttgaccgtcctgagccagaggctgctagccccaccaccagaactcgcccagtgacccgaagcatgggaacaggagacacccctggcctggaggtaccatctagccctctgcggaaagccaagcgagctcgcctctgctcctccagcagttcggacacatcttcccgaagcttctttgatcccacctctcagcatagagactggtgcccttgggtgaatatcacacttggcaaagaaagcagggagaatggtggaactgaaccagatgccagcgccccagcagagccaggctggaaagcagtgctgaccatcctcttggcgcacaaacagtctagccagccagctgaaacggactccatgagtctctctgagaaatcaaggaaagtattccgaatatttcggcagtgggaatctctgtgctcatgctgaagatactccagcgccttcctggagatagctggaatgagagtgactttttgaaaaattaaggctgagttcctttcggtcagctgacactaagtttttcctgttctgggttaatcataaggagccccctgccatagcaaaggcagtgagtgtcaactatctgcatctggctgagagagacccgtttcctttcagggatgtggacagggtaagggcagcaagcatggttctgttaaaggagtgtgggattaacagactagaaggaagactaaggacctgaccacccatttcagcatcttcaatgtggagcagtgttctgaggactcttctatcctaggactatgacagtgtgtattaataaaatatttgctaagattctcaaaaaaaaaaaaaaaaaaaaaaaaaaaaaaaa

SEQ ID NO: 258 - DNA, 1718 bp, HOMO SAPIENS
gcggaagcggaagagcaggtctccaggggagcgatggcagccgggggtctgagccgctccgagcgcaaagcggcggagcgggtccggaggttgcgggaggagcagcagagggagcgcctccgccaggtgtcgcgcatcctgaggaaggcggcggcggagcgcagcgccgaggagggccggctgctggccgagagcgcggacctggtaacggagctgcagggccggagccggcggcgcgagggcctgaagcggcggcaggaggaggtgtgcgacgacccggaggagctgcgggggaaggtccgggagctggccagcgccgtccggaacgccaaatacttggtcgtctacacaggcgcgggaatcagcacggcagcgtctatcccagactaccggggccctaatggagtgtggacactgcttcagaaagggagaagcgttagtgctgccgacctgagcgaggccgagccaaccctcacccacatgagcatcacccgtctgcatgagcagaagctggtgcagcatgtggtgtctcagaactgtgacgggctccacctgaggagtgggctgccgcgcacggccatctccgagctccacgggaacatgtacattgaagtctgtacctcctgcgttcccaacagggagtacgtgcgggtgttcgatgtgacggagcgcactgccctccacagacaccagacaggccggacctgccacaagtgtgggacccagctgcgggacaccattgtgcactttggggagagggggacgttggggcagcctctgaactgggaagcggcgaccgaggctgccagcagagcagacaccatcctgtgtctagggtccagcctgaaggttctaaagaagtacccacgcctctggtgcatgaccaagccccctagccggcggccgaagctttacatcgtgaacctgcagtggaccccgaaggatgactgggctgccctgaagctacatgggaagtgtgatgacgtcatgcggctcctcatggccgagctgggcttggagatccccgcctatagcaggtggcaggatcccattttctcactggcgactcccctgcgtgctggtgaagaaggcagccacagtcggaagtcgctgtgcagaagcagagaggaggccccgcctggggaccggggtgcaccgcttagctcggcccccatcctagggggctggtttggcaggggctgcacaaaacgcacaaaaaggaagaaagtgacgtaatcacgtgctcgatgaagaacagttggcactttgcagatggccagtgtcacggtgaaggctgggttgcccccacgggtctagggagaacgaactctttggggatgacattttcaccgtgacatttttagccatttgtccttgaggaagccccttgcactgctgcggttgtaccctgatacggcctggccatcgaggacacctgcccatccggcctctgtgtcaagaggtggcagccgcacctttctgtgagaacggaactcgggttatttcagccccggcctgcagagtggaagcgcccagcggcctttcctcgctcaccaggccagtctcagggcctcaccgtatttctactactacttaatgaaaaagtgtgaactttatagaatcctctctgtactggatgtgcggcagaggggtggctccgagcctcggctctatgcagacctttttatttctattaaacgtttctgcactggcaaaaa

SEQ ID NO: 259 - DNA, 12630 bp, HOMO SAPIENS
gcgtcatcaacctgcgcggcggccgctcctgcagccgcggccgccgccactgccgggagagctcgatgggcttctcctgcgcgccgcccggtgtctggccgagtccagagagccgcggcgcctcgttccgaggagccatcgccgaagcccgaggccgggtcccgggttggggactgcaggggaaggcagcggcggcggcggcgggagccccaccggggtctgggactggggaactgcctccggcttcacgatgccagtatggacagaatagcttatgatgcttatccccacccaccacttccgaaacattgagcggaaaccagaatacctccagccagagaagtgtgtcccacccccctaccctggtcctgtgggaaccatgtggtttatccgtgacggctgtggcatcgcctgtgccatcgttacctggtttctggtcctctatgcggagttcgtggtcctctttgtcatgctgattccatctcgagactacgtgtatagcatcatcaacggaattgtgttcaacctgctggccttcttggccctggcctcccactgccgggccatgctgacggaccccggggcagtgcccaaaggaaatgccactaaagaattcatcgagagtttacagttgaagcctgggcaggtggtgtacaagtgccccaaatgctgcagcatcaagcccgaccgagcccaccactgcagtgtttgtaagcggtgcattcggaagatggaccaccactgtccctgggtcaacaactgtgtaggcgagaacaaccagaagtacttcgtcctgtttacaatgtacatagctctcatttccttgcacgccctcatcatggtgggattccacttcctgcattgctttgaagaagattggacaaagtgcagctccttctctccacccaccacagtgattctccttatcctgctgtgctttgagggcctgctcttcctcattttcacatcagtgatgtttgggacccaggtgcactccatctgcacagatgagacgggaatagaacaattgaaaaaggaagagagaagatgggctaaaaaaacaaaatggatgaacatgaaagccgtttttggccaccccttctctctaggctgggccagcccctttgccacgccagaccaagggaaggcagacccgtaccagtatgtggtctgaaggaccccgaccggcatggccactcagacacaagtccacaccacagcactaccgtcccatccgttctcatgaatgtttaaatcgaaaaagcaaaacaactactcttaaaactttttttatgtctcaagtaaaatggctgagcattgcagagaaaaaaaaaagtccccacattttattttttaaaaaccatcctttcgatttcttttggtgaccgaagctgctctcttttccttttaaaatcacttctctggcctctggtttctctctgctgtctgtctggcatgactaatgtagagggcgctgtctcgcgctgtgcccattctactaactgagtgagacatgacgctgtgcgtggatggaatagtctggacacctggtgggggatgcatgggaaagccaggagggccctgacctcccactgcccaggaggcagtggcgggctccccgatgggacataaaacctcaccgaagatggatgcttaccccttgaggcctgagaagggcaggatcagaagggaccttggcacagcgacctcatcccccaagtggacacggtttgcctgctaactcgcaaagcaattgcctgccttgtactttatgggcttggggtgtgtagaatgattttgcgggggagtggggagaaagatgaaagaggtcttatttgtattctgaatcagcaattatattccctgtgattatttggaagagtgtgtaggaaagacgtttttccagttcaaaatgccttatacaatcaagaggaaaaaaaattacacaatttcaggcaagctacgttttcctttgtttcatctgcttcctctctcaccaccccatctccctctcttccccagcaagatgtcaattaagcagtgtgaattctgactgcaataggcaccagtgcccaacacatacagccccaccatcatccccttctcattttataaacctcaaagtggattcactttctgatagttaacccccataaatgtgcacgtacctgtgtcttatctatattttaacctgggagactgttgtcctggcatggagatgaccatgatgctggggttacctcacagtccccaccctttcaaagttgacatatggccatcccattggccagaatccacagacacacctaagcctgtggcactgggacagaatagattttccatttgagaggcacttcctgtgtcagtcttgtttgaaggaggtggtgatggtggatagaggtgaaggaggtagggagtgccctccaagtgcaaaaataacaaatatgattattgaccatcggggaattctcacacattgatttgttttttaagcaattgccagaaacccccttttttagcttttgcttggggtgggggtaggagttaaggtttattcaatcctgtcctgggtagggcgaaagttaatctagccatgtgatttttcagaaaagtaagtggaacatgctgccacttttcaattctgtcagtgcttccacatggaaacaaaatgcaataaaatttttccaaaacctgttctgatttagctctctcttgaggtgttacccttagtgggaggccgactatccacaatctacttgagttttctctggttgggtgtttgtttcattgctctgtctcttgaatgaggatactttattttttttgttttaaaatgcatttatggtccctctcttgaaccagcttgccccaccaggcctctttcctttgctttctgcagcctgaatcaattcctttgtgctgatgggctctcctaagagctttcctgagtcagttaactttacctcgtgtctacggtgctattcatgcgatacgggcgaggctgagatgctaagattaaaaagaaaagaatgctgttttagatcaagttgatagcatttgttttccatatgcttttttaaaattttttcataacatacagctcagttaggtgtatgaaagaagtgttattgtattaaataactagagcagggctacagctctggccctcccctagggggaagagattggtaatactccatcttccagggcattttttaaagtgagccaggttagctcttttcccctggcatttctcaggaatgcagtagatagtgctgaagatgcactgacttttttttagtcctaaaaatagaaactcctcctttaaagctgtgcatactatgcttatctttccaatagagtggggttccttcagatatcctataggattctgcctctggttttgtataggccttggctagaaagagtcaatgtttctgagctctcaaaccagttgctctcagaagataggaataccccaaggttcctggcatttttcctatttcatttttgttcagactgatattttgccaagagcacaatgactgaggaatgtagccatcatttgcagggtagtgattggttcccagcctggcttccacacaggacaggaagggaaagcatccctgagctctcctcagtatttccggatgtaatgaaagaggacatctttctacacaaagtcagccccaacttttggcttggtcacaggagttctgatagtactgtttggtgcactcatgggaaattgaaccagtcgtagccacagtctttcagagcctgggctctggggagtggaagtgaaaaataaagatgtggcttgttggattgtgatccccagcttgctttccttctgtcaactctgtcaggtttgtgttcatagcaactagactgaatatgcaaaaggcttagatccaagcaaatctataatctatgcatatttgcatgggcttggtaatatcatgtacacaaaacacatttgggtagaagtgcatgtgctaaatctccttttagtcccaccattttgtcttcttcatactgtacttcctcttttttgtttgagacaaggtcttgctctgtcacccaggctggaatgcagtggcacaattagagctcactgcagccttgaactcctgggctcaagtgattcttgtgccttggcctcctgaatatccagggctacaggcacgtactaccatgcctggctaatttttttgttttttaatagagtcagggtctcactgtgttgccctagctagtctcaaatgcccggcctccagcaattttcctgccttagcctcccaaagtcctgggattacaggcgtgagccactgggcccagccctgtacttcttgaaaaagccccaagtattagcttttgctcatctggctaggccacttaaatagttagaatccaccgtcccctaatgcagaaaccgtttaggtgaggtaaattaacaaacattttaagccgggcgcggacacttctcactgtggacatccctcacgcctgtaatcccagcactttgggaggccgaggcgggcagatcacgaggtcaagagatcgagatcatcctggctaacacggtgaaaccctgtctctactaaaaatataaaaaaattagctgggcgtggtggcaggcgtctgtagtcccagctacttgggaggctgaggcaggagaatggcgtgaacccgggaagtggagcttgcagtgagccaagatcgcaccactgcactccagcctgggcgacagagtgagactccgtctcaaaaaaaaaaaacaaacattttaaacatgtatgtgaggttggcattacacagaaactcctctccgggtgggctgggatgggctttctcagccaggctaatgggttttaaatttctctcttttcaagacttgcagtgcatcagcttaaagggtgagccagccagtagaggggaaggcgccccacctagaaggtgcccttagatatcaaagaaatgtgaaaagagaaagattttgctagaatcctcctcaaaggtgttcttgaggttgccagaccagcaacgtcaacatcagcatcacctgagaacttgttagaaatgcacattctcggtccccaccccaggctaccgaaccagaaaccgagcggggcccagcagcccgtgtcttaacagccctccaggtgattctgactatcaagtttgagaatccagttggggctagcaggagtcccccctcaggtggtccctgatgcctgctggtgatatgggtcttgtgtgctgctgggctcagcatagtgcagttggggtgtgctgattgtgagacaggcacgtgttccctccgcggagaagccactgagactgccttccctcataagctgcggcctccccaacaaacaactgccaagacatcaaagaaagtctgtatgaagcagatccaaattattagcctgcccaccactccttgtgcatctcatcagtggaacccatctctagaccaagggccctttgggtgaagaagcagcccggaagggaaagagaaaagagtagaaccaagggacctccagatgggagcggcggccggtgagtagtctagagccaggggcattgtagcagcctggatacatgacctgaacacgtcttgacctttgctttctacgtgtgggtttcaacacccatgtggctttttcttgtattctttaaatatgtatctggcttaggatcacctcatagaagagaaagaattcacagtgaagcagaaacaagccactgaccagcgtactcccaacctgaaccttctttttctcaccctctccctcaagtaaacatcttgctgacttgagcagtgtgattgccgtagcaaagcagagtggcccccagggatcccgctctgttgggcccacaggaggagccgatgaagctgatccaaggagtgaggacaagcgctgcagagggacgttcgctaaaagccttctaggggccgcacatgctctaacacggacataaggatgccctgaatttctgcagctgaggccatatagtctggtgaccaagtatttgggtcctggcttcagtctttggttgaaatgtctgcttggctacttattaccgcacctactaccaaaatatgaccttgagcagtaacttctttaagcctcagttttttcatctgaaaacgggaatgataatctaaatcacaaagttaatggaaggattaaatgagggtgatgaataggaatgtatagcgtctggccctggtatggctttataaatgttagctgtgttggagctgtgcttttcaaaccattggtcacagccattcatggtttgcaaccagcatgtttttcaagaaaaatgtttaatgcattacatattgcaggataagtattgttttatgaagcttagggagttgtgtgtatatgtgttctggaatgcaacagaaaaatgtttcctcttgtgggttacaatatagaggtatgaaatctctgatgaggagagacagtgttatctggcccgctatgaagagacacatttgcataggctgctccctgaggctctggctttctacatctgatgatacagggagcagggaacagcctgttctcgttctgtggggctcagctgagtctgttctgcacagactcttccttcctcgggagccttagtcctaatacattcattttggagtgttggtgagtttgttcacagatcacagctcatgtgtcacccagactgacctgggccaaaaggcccatcacacaccctgcaagagcttctggtgtcgactatgacccccttaccaggcatcaaccatttttgttcgttctcttgagcctgaagctactattactgctcctctgcaaacctcaagcttaagaactttgcctgcaggatccctttaaatccacacaaaactcaaaattgagtcctaccaggaaaaagcagccctcagcccatttttatacatcggatttgtttgcaatattttctttctagactcaaaagtcaacactccctgaaagtttgtcgactttactgctgaagacctctggtagacaggccaggctctgtctggaatactttatgaggttggtgaggaggttgagtataatccaagagtgcctatctgggagcatgccacatgaatggcaaataatcatcctgtgggctcttggcttcattccccttctctctgactgagctcagcctgggcacagtggtgatttgcagtagaactggaaacctgttgggcagaaaaaaagacactagttctggttccagttctgatacataacaagctagatgagccttggccaccgtcatggcctcttggaacttctgtttcttccccatctgccaatcatcaatactcatacccacctcctcacaaggaggccataaaaacctatggtcatggctttgagtccaagtcagtgtggatgcagccagtctgtcatttttgggtgtttcctctgtagccgggtctgccatatggtgatgtcccagctctcgtgctatgaagttaaagcctctttctcaacaggctgcagatgatcacccaggaagagaatgcagaatgcccaaagcaaaccatctcagctggtcactgcttctgtgccaagaagggaggcctggcgaggggccagtcaggaagcagcatggcatcacatgctcatgacccacatgaaggtccctttagacttgtgtcaacaagatccattttctgaaacaactatttttgttctgattataaaagtaacattggctcattggtaaaacttggattgtgtgagaagtctacagaaataaatacaaatcctctagaattccatccccaaaagtaaccactcagacaaatgttctaatgtcatgtaaaaccatattaaaccatcttttctagctgcatagtgttatagaatcatttgcttaaccatcattattgggcatttctcatttccagctttgcattattataattcagtgttcaagtttgtattgcataaatctttgtctcagattattgattatttttaaactttttgtgaaatcagacttacaaaaatgtgacaaaaacagtacaaagagttcccatgtacctttcagtcagtctcaccaaaggtaaacattttatacaaccataatacaaatataaaaccctggacattggcaacaccatacccttaactaatgtatgtaccttattcacatttctccagttgtcccattaacacccttttctgttccaggatcccacactgcatcatttgcgatgtctccttagtctcctccagtttgtgacagttcctcagtcttcctttgtctttcatgaccttgaccctttttaaaaatcgaggtgaaattcctgtaacacaaaattagccattttaaagtgtacatttaatgcattcacaatgttttgtaaccaccaggtctgtctggttccaaaatcttttcatcaatctttgacccttttgaagattgtagggcaggtattctgtaggctgtccttcagattgtgtttttgatgtttttctcatgattagattgaggttaggcatttggggcaggagcactgctgaagcaatgtgtcctcgttgcaccgtatcaggaggcatatggtgttgatacgtttcattattgtgatgttaactttgatcattgggtgaaggtggtacgtgcaatgtttcttccctgctattaaggtactgtttttccctttgtaattgataagtatcttatgaggatatacttttgagatccaatttttttaacttagaatttattcaaaagtcaagaatcttaaatctctgaaatggcgtgggaagaaaaagtgctagatacacagagatctttcttgagtcatgtgaaggagcagtgcccaagcccagcaaacccacagcaaattcccttggcttccagaagagatggagaaagcagtgcccccagtggagggtcaaaggcctctgtgcagggtgttgtgggcctggagagctggcctggccatgtctttacctcctctgggcatctccccaccccaacaccctttctgtggcctggtggctgagttgcagccgacacccagaggcaggtgagttgacagcttggaagaggctgcagggtggatctgctgcatgagcaggcctgagcccagccttacctccccacagtggtcctgtgtgccctccggctgcctaatgcatgttggcacttgctgtacgagcacccgcttcttcacctcgcatgctgtttgtgtcctgcactccttccttaaccccatcgtccttctgctgtgtttgcagcccctatctaccctggtgggagtggccaaaaatatttaggaggggatcaccagtttgtagtggcctcagaggatgtgtggtcccccttatgcctcagccactcatcagcctagcccctgcccatcatctggcattgcacttgtggaaggaaagaaggggagggctgggtggtgggtggagaacacgtcagtccaccaggcgggccctgcttgctgtgttcctccacgctgctgtccacccacaccccagcagtcctctgagggacctcccgggggtgacctgggccacaacagactgcccactcagaccccatcttacccatgccgtggacaccccgcccccccccccgccactgctatgctatagctgggggtgtctatgtgagctgtacagcccagcaccacgctgacgatgttcttcatccccttctccctgcagggcatcgagcgcctcaaacgaaagaaccagcccagggagcacatggggagctggcagtcagtaaaggagacctttggtggggacttctccctgaactggttcaaccccttctccagaccgtgtcagccagagatccccagtgacaaagacatggtgcggcaggtgacatcgctgtcagacaccgaaacaatggaggatccatcagaggagacaaaggacgaggactctgtggaggtgacagatgaatagatgctgctgtggggagagaagcaaacactaaaaagtgctgtcaaccttcatcctggggttttggctaaaggggcttatgggcatggtgcgctcccagcacccccagtgcttcccttagccactcgcttggccttgccatttcccctccttcttctctccatgttgggccaggtctgggggtcgggagtaggctggggacatcagaggaggatgggggctttctcagagttcatctaagaagagtctgcactgagacggctcatcaagaaccgttctccaagactgggtggctttcacattctccgcccagcaaagggagcttttgaacagggcatcccaggggcagaaaagagcttgcctttggctttccccaggatttctgtcttctcttgggaaggctgggcccctggctcctggctttgagaagtaaggttgtgacagaaggaccgggcagggcttgccttggggacctgggttgggacactgacatcaggggagactagcctggaaagactgcagagctgccagctactccctggaaagggcttccccatgctgcctgccgaaattaggaggtagaggtggctgccacatctacctgcaagggccaggcatggttcaaagaggaccctgcattaagctctacacacacatgtgcaggacatgtccagcatggacagagccagagttaagacagtagcaccgaaaatgagcccccattccacagacactggagtcttcactgagcgagacagctgggagctgtcctgcctgtggctacatatctagccattcacagatgtggatatgggaaggacctctttggagctactggggactccctaaccactcgcatgagaacttaattgaatgttacctcttggagggagtctaataacacatgtaggtagaactgaccataaaccctgcctgtgtgtttgaaaaggccagttctcccaaattggtgcccatcttgtctctgaaaagatgggtgatggccagggtctgctgattgatgaatcagatgaatcaggaagatagacaaacacacacacacacacacacaccccaccaggatgagtctgccctctattcaccccatttgaagcctgtggtgtctgtgaccactgctgaaggtctgagcagcgttctggtgctcctaaaccccattccagtggttgctgaagcagcatcttctgcacaaagcccaacagaagggttcttatccccgtttggtataagaagtggattcaccacccactccctccacgtgcctttgttcctctctttggcccatttccccagcgtctactggcgtcaggattggcaggagcacaggcactcagcagagcatgcccctgcaagacctcagtgttagggccccccttccagctccaggcaaaagggcatgagtcctggccccaaggggcctgtggctgcagttcagaggagaagaaggtcagtgtttggaggtgcagcctcaggatgctgagaaaggaaactggcgaccgtgagaaagaaaagagccaagcagcatcctggttcttggacagcatctttggacactctgtgaagggcaacgatcctgccagagaccgtctctctacaactgatgacccactagggcctggggttaattgctcaaagggcccagtgttcacaaagccacctctgccctaacccttgccagagctctccaactatgacccacgagaggggtgatggtgggattctaacatcaacagagcaaccagaaagacattgggcctcccacactcaggctgcaggcccactttcttggtccttatcagctttaatatttattaatgacgacataggagcccgagtcagctgtaaaggccattaacttgcaatctggacaggaagttgacgctcaccactttgggtaagagctgctctgactgtagggccccctatttgttgtcctaacccagaagcagctctgggctgccaggatggtggatggaataccagagagttcacactagggaggaagcaatgcctgccccctggagtctcctagggggcagcagttagaataagggaagaggatttgctggtcactgtttgctgacatgggtttccatggtgagttcaggcctgaggacagcagtgtctgcaaaaccacatggcccttgagaaatgtccttgcacattgggcttcaaactcctcttctagggaatccatcttggcctgaaagcagaggtacaacaccagccccaaaggcaattctgttttcagattggttgctctggaaaggaaggctggggtgagggggcattttacttgcacagaggctgaccctgcctcccctcttcactgaccccatctccaaggtagacctcagccatgtcagtccctgttctgggaggtgctgggctgggccacagccagggttatgtaggtaattaacctgtccaaccctgagcctcgcctccccacaccagcaacacagtggtctctctgtggtgaccattcacagcataacattctgcttagcctcagactgaaagcattgcaactgatgtcaaaaccagatgagatcttacagggagagagattgggtgcaatttgcctctttctttgaataaaaagctctttgctcaccctcaaaaaaaaaaaaaaaaaaaaaaaaaaaaa

SEQ ID NO: 260 - DNA, 5968 bp, HOMO SAPIENS
cctggctgcgcgcggcggtggcggagccgctacggctgtagcagcagccgcgaagatggcggaagggctggagcgtgtgcggatctccgcgtcggagctgcgcgggatcctggctactctggccccgcaggccgggagcagagaaaacatgaaggaattaaaggaggccaggccgcgcaaagataacaggcgtccagatctggaaatctataagcctggcctttctcggctaaggaacaagcccaaaatcaaggaaccccctgggagtgaggaattcaaagatgaaattgttaatgaccgagattgctctgctgttgaaaatggtacacagcccgttaaagatgtctgcaaggaactgaacaaccaagagcagaatggtcctatagacccagaaaataatcggggacaagaatcctttcctaggactgctggacaagaggatcgtagtctaaaaattatcaaaagaacaaagaaacccgacctgcagatctatcagcctggacgacgtttgcagactgttagcaaagaatccgccagtcgggtggaggaggaagaagtcctcaaccaggtagaacaactgagagtagaggaagatgagtgtaggggaaatgttgcgaaggaggaagttgcgaataaaccagacagggctgagatagaaaagagcccaggtggtgggagagtaggggctgcaaaaggagaaaaaggaaagaggatgggaaaaggggagggggtgagggaaacccacgacgacccagcccgcgggaggccgggctccgcaaagcgctactcccgctcagacaaacgaaggaatcgctaccgcacgcgcagcaccagctcagctggcagcaacaacagcgctgagggagctggcctgacggataatggatgtcgccgccgccgacaggataggaccaaggagaggccacgactgaagaagcaagtgtctgtgtcctcaaccgattccttagacgaggacagaattgatgagcctgatggattaggacccaggagaagttcagaaaggaagagacatttagaaagaaactggtctggccgtggggagggtgagcagaaaaacagtgctaaagaatatcgaggcactcttcgtgtcactttcgatgcagaagccatgaacaaagagtctcccatggtgaggtcagccagggatgatatggatagaggaaagcctgacaaaggcttgagcagtgggggcaaaggctctgagaagcaggagtccaaaaacccgaaacaagaacttcggggtcgtggtcgtggcattctgattttgcctgcccataccaccctatctgtcaattcagcaggttctccagagtccgcgcctttgggacctcggcttttgtttggatctggtagtaagggatctcggagttggggccgtggaggcaccacacgccgattgtgggacccaaacaatcctgatcagaaacctgctctaaagactcagacgccccagctacatttcttggacactgatgatgaagtcagccctacatcttggggtgactcacgccaggctcaggcatcttactataagtttcaaaactctgacaacccctattattacccccggacaccaggccctgcctcccagtatccctatacgggctataaccctctacagtacccagtgggccctacgaatggtgtgtacccagggccttactacccaggctacccgactccgtcaggacagtatgtgtgtagccctctacctaccagcaccatgagtcccgaggaggtagagcagcacatgaggaacctgcagcaacaggagctgcacaggcttctccgggtggctgacaaccaggaactgcagctcagcaacctgctctccagggaccgcatcagtccggagggcctggagaagatggcgcaactcagagctgaactgctgcagctatatgagcgctgtattctattagatattgagttctctgataatcagaatgtggatcagatcctgtggaagaatgctttctatcaggtgattgagaagttcaggcaacttgtcaaggatccgaatgttgagaacccagaacagattcggaacagacttttggagctcttggatgagggtagtgacttctttgatagtttgcttcagaagctgcaggttacttacaagttcaaactggaagactacatggatggtcttgccattcgcagcaagccattacgcaagacagtaaaatatgccttgatcagtgcccagcgatgcatgatatgccaaggagatattgctaggtaccgggagcaagccagtgatacagcgaattatgggaaagcacgcagttggtacctgaaggcccagcacattgctcccaagaatgggcgcccctataaccagttggctttgctggcagtgtatacgaggaggaagcttgacgctgtctattactatatgcgcagtttagctgccagcaaccctatcctgactgccaaggagagtctcatgagcttgtttgaagagaccaagcggaaggcagaacagatggaaaagaagcaacatgaggaatttgacctgagccctgaccagtggcggaaaggaaagaagtctactttccggcatgttggagatgacaccactcgcctggagatctggattcatccatcccatccacggtcttcccagggcactgagtctgggaaggattctgagcaagagaatgggctgggcagcctgagtcccagtgatctgaacaaaaggttcatcctcagttttctccatgcccatgggaagctgtttacccggattgggatggagacattccctgcagtggctgagaaggtcctcaaggagttccaggtgttactgcagcacagcccctctcccattggaagtacccgcatgctgcagcttatgaccatcaatatgtttgcagtacacaactcccagctgaaagactgcttctcggaggagtgccgctctgtgatccaggaacaagccgcagctctgggcttggccatgttttctctactggtccgccgctgcacctgcttacttaaggagtccgccaaagctcagctgtcctctcctgaggaccaggatgaccaagacgacatcaaggtgtcttcctttgtcccggacctgaaggagctgctccccagtgtcaaagtctggtcagattggatgctcggctacccggacacctggaatcctcctcccacatccctggatctgccctcgcatgttgctgtggatgtatggtcgacgctggctgatttctgtaacatactgactgcagtgaatcagtctgaggtgccactgtacaaggacccggatgatgacctcacccttcttatcctggaagaggatcggcttctctcgggctttgtccccttgctggctgcccctcaggacccctgctacgtggagaaaacctcggataaggttattgcagctgactgcaaaagggtcacagtgctgaagtattttctggaagccctttgtggacaagaagagcctctgctggcattcaagggtggaaagtatgtgtcagtggcacccgtcccagacaccatgggaaaggaaatgggaagccaagagggaacacgactggaagatgaggaggaggatgtggtgattgaagactttgaggaagattcagaggctgaaggcagcggaggcgaggatgacatcagggagcttcgggccaagaagctggctctggccaggaagatagctgagcagcagcgtcgccaggaaaagatccaggctgtcctggaggaccacagtcagatgaggcagatggagctcgaaatcagacctttgttcctcgtaccagacaccaacggcttcattgaccacctggccagtctggcgcggctgctggagagcaggaagtacatcctggtggtgcccctcatcgtgatcaatgagctggacggcctggccaaggggcaggagacagaccaccgggctgggggctacgcccgtgtggtacaagagaaggcccgcaagtccatcgagttcctcgagcagcgattcgagagtcgggactcttgcctgcgagccctgaccagccgtggcaatgaactcgaatccatcgccttccgcagtgaggacatcactggccagctgggtaacaacgatgatctcatcctgtcctgctgcctccactactgcaaagacaaggctaaggacttcatgcccgccagcaaagaggagccaatccggctactgcgggaggtggtgctgttgacggatgaccggaacctgcgtgtgaaggcgctcacaaggaatgttcctgtacgggacatcccagccttcctcacgtgggcccaggtgggctgagggagccacactggggccccccccccgtggaaccgttcctgaaaggccaccaggcgcccagtgtagcacggaagatgcccacgtgcctgagccaccaatccacccagacaataaaccatcctcttccaacccacgccacggccatgctgtgggggacctgctcctcacagagcccctcccaaggatcgggcggaagctgctgggaccctcctgggctgccaggatttagcagggaggtggctggctacagcaacagcagctgggcaagccagataggccgcccatgctctcagcctttctccctcccccgtctcattccaaggctgagggagggccttctcgcctggggacgcagccactttctccagtggagacagggcaggggttctgagtttccgtcagatgcagtgaaatcacagttccctttcatcttcagaacctctgtcgtgaatgtgttcaagaggctttggttaagtcaggaagaagtgcccagggtgtgtgtccccagtctccctgaggcctggactcgcccatgaacccaagtcggcttctagacagcatgtccctaacagcagccctgggcccccacctcttctaccatccaccccagacttaccacacacccttcctgctgctcctcttcctgcccttatcaacctgggtccctcacacttcgccagttgcgtccccgtggacagtcatgagtctagaggaaaggggcatctggtctcaggcccgtgctctcgggtggcctccacctgctccctctctcctcactggcctttctttccgtctagcttcctcttcaggaaatgtcctgactcccctcagctcccccttcacccctccttgcccgcctaccctccctccagaatagcccctcacccttcttccccttctagttgatccttttcacctccctgatccccttcatttcttcaccgcggttcctcgtcataggggttctcactctgaactttccctctctactacccatggcaggaacctagtacaggtctcccacccagggccttccaccctcggctcctgtgctgggagaaacttccaggcgtggacagcccagcctgaggcattccagtgctggggcaccgtcgcctaacctggtttctagctttgccctcactccccggaaaaactgacactgacacaggggccctttccttgcccctttagctggtacctcagtggggaggcttccttaccaagaatgagttcctgaaacccagggccagagacaaggacaacttaggggaagacggggttttcggtggagccaggggcaaatcttaatgggaccagtgggggataccccagagcccatggcctgactgcacagcctgcctggaggatgggtgcgcagctctgccctccctgaggcccaggactatgccagaagcgatggggtaccgtgtaggggagccaaggccagtagtttgggggtaggagtcccctagagtctcagaagactgggctctttggagtacagggtccccggcctctcctttaagattctctccccagctggaaggccgatgactgggtggtcgggagggagacccagctctcctttctgtcccgtttgcagcactggttttgtttccttaataaatttttagttatgaaacatacctg

SEQ ID NO: 261 - DNA, 5617 bp, HOMO SAPIENS
tataaaaaaagtactgaagacattttccccgcacaactgctaaagctccagagacacgagcgtgtgtggcagcaagagccgccagttcgggaccaccgcagctggggtggcagcggcgcaggaggggtcgcggggagggagtggtgagcgcaggcggcaggggtctgggaaagacgaagtcgctatttgctgtctgagcgcgctcgcagctcctggaagtgttgccgcctctcggtttcgctctcgctcgctgcgctcctagaaggggcggccgcctccaggactgaccagggccaagtggcgctcggcgggcactacatggcggagggtgaagggtacttcgccatgtctgaggacgagctggcctgcagcccctacatccccctaggcggcgacttcggcggcggcgacttcggcggcggcgacttcggcggcggcgacttcggcggtggcggcagcttcggtgggcattgcttggactattgcgaaagccctacggcgcactgcaatgtgctgaactgggagcaagtgcagcggctggacggcatcctgagcgagaccattccgattcacgggcgcggcaacttccccacgctcgagctgcagccgagcctgatcgtgaaggtggtgcggcggcgcctggccgagaagcgcattggcgtccgcgacgtgcgcctcaacggctcggcagccagccatgtcctgcaccaggacagcggcctgggctacaaggacctggacctcatcttctgcgccgacctgcgcggggaaggggagtttcagactgtgaaggacgtcgtgctggactgcctgttggacttcttacccgagggggtgaacaaagagaagatcacaccactcacgctcaaggaagcttatgtgcagaaaatggttaaagtgtgcaatgactctgaccgatggagtcttatatccctgtcaaacaacagtggcaaaaatgtggaactgaaatttgtggattccctccggaggcagtttgaattcagtgtagattcttttcaaatcaaattagactctcttctgctcttttatgaatgttcagagaacccaatgactgagacatttcaccccacaataatcggggagagcgtctatggcgatttccaggaagcctttgatcacctttgtaacaagatcattgccaccaggaacccagaggaaatccgagggggaggcctgcttaagtactgcaacctcttggtgaggggctttaggcccgcctctgatgaaatcaagacccttcaaaggtatatgtgttccaggtttttcatcgacttctcagacattggagagcagcagagaaaactggagtcctatttgcagaaccactttgtgggattggaagaccgcaagtatgagtatctcatgacccttcatggagtggtaaatgagagcacagtgtgcctgatgggacatgaaagaagacagactttaaaccttatcaccatgctggctatccgggtgttagctgaccaaaatgtcattcctaatgtggctaatgtcacttgctattaccagccagccccctatgtagcagatgccaactttagcaattactacattgcacaggttcagccagtattcacgtgccagcaacagacctactccacttggctaccctgcaattaagaatcatttaaaaatgtcctgtggggaagccatttcagacaagacaggagagaaaaaaaaaaaaaagaaaaaaaaaagagtgatccagcccttattagggatgtgttttgtgcaatgatgatatgctcctggttttaagtttggcaaagcttatgtatcttttaatagatgtgggagcatgatctcgaaaggatccttttcccttctcttattctcctacccaattggattctatcctgcaaaaaaagagagacctgtcattagaagcaaccaggttctcctgatacaagagaagaaatgtgtgatgacaatatgggtttgctgtatctgctcccatagctttgccataggaaaaaaaaaagtggaaagtttcttttaagatggaattcataaaagggaaaatacggaggaaaaaaggtctcactccaacttgtgaatcagtttaggagttcagatattaatagtaacaatacaggaaaaaggggaactccaacgttgggattactgtctgaggcttgtagcaagtgctttctgtggaatgatcttgttttgctaacaaacggcttgctccaaatgaacagtagtaggttggtgcagttctcgtaacaatcagcagaacttatgatgacacaatccattaattccagctgcgtgcatagatcacatttttaaaatgtaaaaatgcaagcaaaaacagctgtaacaaagaaagtgtgctcaaggaccaaagatttaacagataaaaatacccaattagaagagatatagtagactatatgaagagagattatatttgttacacaccaatatacatcaaagtgcctgttgccttctgaaaatttgaagtggcaaaattattttatggtttaatgattattttattttatcagggactgcctcaagaagaaaataacataagcttgtgaatggtggagaaaatgccctattttttcttgcaaatacttgtataaagttaacatttgttgatctgatattatcataggtacatgtgtatgtgtgtataaattatatgtgtgtgtgtatatatacattttatatatacattttatatgtatatatacacagtagattgactatgatctagaataatgtctcaaataggaaatgtttaaatactgtgtgtttttatgttttcaacaggataacatgagacgtgggcatattgcaatgatgaattaaatccacatctaaaaaaattaaatgaaggagggaaccaagtaatatatttcataggaagagcagaaattatactgttttagtgggatttttttttctttttttttttttctttggtgagccataaaattccacaaatgggagaatatttgtttggcagagcactcttttttatattgaactgccattttgacagttggaacccatttattaaaaaaaaaattgcattcctctatgatgtttaatctagtggatcatggatcagtaataggctacttaaatccctgactgctaaaaaggatttccggtgatctaaacactacttgctaatgtttaaatgaattttaatgaatgcattctgcatttctggaccactagaatttagtaatgtgaaatgaccctttttacagaatatttgcacaattgcttaaaatttatatatgagatatatattatatataacattttataaatcatgtcaatatgaaacatctttgatctggttgtcacactgcatttaaatatttagtactgtactttaaatcgctttccattaaatcaaatccaactttattttctttcttacaaaaataccagttatacctttgtgaaatgaactggcattactatttcagttcaataacagctaatcctaaaaccaccctttctcctagccagtagttcctctagatactggtctctgaaaatgcatttgttaaaaacaaaacaaaactaacacataagaaccttccctttgtgttgtgaaacaaccacataatctccacaaccttagtggatgactgcttgctatgataattcctcgaagacccaattagaagattttcatcatcagttaaagagagaccacgggagaaaaaaatatcctcctgttggcagtataatttgtttgtttgtttatctagggatcctcagatgcttagtgctaggttaatccaggttaatccgtctggactaccttttgtgcatctttctttgaagccttaatgggaacctgatgggtttgctgtagcagcttccttgtgaattctgtcagagctgcaacagccgctgcactgccactcagttttctaaggaactcctcctactaccatcttggctcagtctccctcacttaagccctgggtttgaaaaattaattgcaacttcccaggaaacattgttcagtttgcagattaagcctggcactcacctatcagaaaccagagctccgcctgcttagttgtttcaaagttttctgaaagaaaactaggggagcacttgtgaacacaggagcagctggtgatctgctttcttaccctaactcttgacaaatgagtcgtctactattttaaagagtctggaggtctctgactctgccataacaataacctgctgttaatttataacacagatttttgtttggaagagccttatttgaaatacactttgatttattttcttaaatatttatattcttttcttgcttacttcagggttggtagcttagttggaagtgccagcacctggcacctattcatatagaacaggctgtactcaagacaacttctagcatttactttaagacttatataatttatttctattttgtgtgtactatagtcttgtgcatatgtagttgaacacacagtgaaatatatgtctctctttgtggatgtgcggcctaaaaatttgaatgtctggtgagagagagccatgtgtataggtcagagaaaagaacagctcccgactccctattagcgcctgtgatttgtttccttttgtgtttatctggcctagtgtgctgtttctttaaaccaggaagaagttttgtcttttggaggctcttctcacctgtccagcctggcatgtcagagaacacatagcctgtgacaatgccgtttttaaaggtttacttaatttgcagtaaatccagctgcctcaagaactcctacaccaagatggacatttcctttccagaaatgggatcaagtatctgctcactttggtattggatggactaataatgtagctccaaaaatgcaaggatggaagaatatgtgtaatccaaaccaaggaaggaaatgaaaagtgaacgtactgtttttaccacccctttctgtttgcttattgttggttgcttcactgtgcataaagttgttttcaatgcaacgcttgttaaataaatattgtgaactattttgtaaatgaaatgtattatgttgaaagctgtcagttcaaaaataagcttttttgttgttgttgaagatgaagtgtgttaggtgaaaccaaaaagccaaaaaaagtaatttcatatatagcatctatttgaatataatctttctttaaaatttcttttagcatagcattttcagtgctaagaaagaatctctatgttatattttgttaaaataatggctttctaacaaagcaaatggtaaagtacaaagttggaagatgtcaagttaacgagacttgctgcaaagccttgcagaacggaggaggctctgcctgctggctgtctctccctccaacctctctacaatcatgcctgctttgaggtgttctgttgcagcaagctgcaccttgggtcactcttttggaatattttgactataggctgcgtcacaggcagaaaaggagttgatggaaaatggactaaaaaactgacatgtttgaatcagtgctagagggaacagattgtgaattttgtttacagcatccaatatttggatttttttgtaaataaaaaagttatttttttctattgaaaaaa

SEQ ID NO: 262 - DNA, 4028 bp, HOMO SAPIENS
gcatgatgggagagtgtgtggagtgggcggggggtctccgcggaggaggtggaggaggcggcggcggcggcggaagagggcggagggtagtgggatgggggtcccgcggcagcggtgaaactccgggtgggcgtccatggtgctgctgcgctgacagggctgtgagcagccggccttccgctctcaccagttccgcgtcggaatagacggtccttccccggggagtcagttcctccccgggcccctgagccatgcccatcgcagccgccccgaaggagccaggtgtaaattaattatttgaaagcaactgaacaatggagccagacatcattcgaatgtactcttcatccccaccaccattagacaatggagcagaggatgatgatgatgatgaatttggggaatttggtgggttttcagaagttagcccttctggtgtagggtttgttgatttcgatacaccagattatactcgtcccaaggaagagtttgtaccttcaaaccattttatgccaattcatgaattctcagaaaatgtagatagccttacaagctttaagtccattaaaaatggtaatgataaggacatcactgctgaactttctgctcctgtgaaaggacagtctgatgttttactttctaccaccagcaaagaaataatttcatctgaaatgttagctacttccattgatggcatggaaagaccaggaaatttaaataaagtagtggagcagagacagaatgttggaacacttgaaagtttctctccaggagattttagaactaatatgaatgttgttcatcaaaacaagcagttagagagctgcaatggtgaaaagcctccttgtctggagattctaacaaatgggtttgcagtgttggaaactgtaaatcctcagggaacagatgatctggacaatgtagctgattcaaagggacggaagcctcttagcactcatagcactgagtataatttagactctgtacctagtcctgctgaggaatttgcagattttgccacattttccaaaaaggaaaggatacaattagaagaaatagaatgtgcagttttaaatgatagagaagcactaaccattcgggaaaacaataaaattaatagagtcaatgaactgaattctgtaaaagaagtggctttgggtagaagcttggataacaaaggagacactgatggagaggatcaggtttgtgtttcagaaataagcatagtgactaacagaggtttcagtgttgaaaaacaaggccttccaacactgcaacaggatgaatttttacagtcaggtgttcagtcaaaggcttggagtttggtagactcagctgataattcagaagccattaggagagaacaatgtaaaactgaagaaaaacttgacttacttacttctaaatgtgctcacctatgcatggattctgttaaaacttctgatgatgaagttggttctcccaaagaagaaagtagaaagtttactaatttccaaagcccaaacattgaccccacagaagaaaatgatttggatgattctttaagtgtaaaaaatggtgatagtagtaatgactttgtgacttgcaatgatatcaatgaagatgattttggtgattttggtgactttggctctgccagtggctcaactccaccttttgttactggtactcaagattcaatgagtgatgccacttttgaagagtcttcagagcactttccacattttagtgaaccaggtgatgactttggagaatttggggatataaatgctgtttcttgccaagaggagacaatattaacaaagtcagacctaaaacagacttctgataatttatcagaagaatgtcaattggcaagaaaatctagtggaacaggcactgaacctgttgcaaaacttaaaaatgggcaagaaggtgagattggacattttgattctgtgccaaatattcaggatgactgcaatggttttcaagactctgatgattttgcagacttcagttcagctggtcctagccaagttgtagattggaatgcttttgaggatgaacaaaaagatagttgttcttgggctgcttttggagaccagcaggctactgaatctcatcatcgaaaggaagcctggcagtcacataggacagatgaaaatattgatactccaggaacccccaaaacgcacagtgtaccttcagcaacttccaaaggagcagttgctagtggccatttacaggaatcagccacttcagttcagacagctttattaaaccgcctggagcgaattttcgaagcatgttttccttccatacttgtccctgatgctgaagaggaagttacttccctgaagcacttgctggaaacaagcactttgccaataaaaacgagagaggccttacctgaaagtggggaattgctagatgtgtggactgagctacaggatatccatgatgcacatggcttgagataccagtggggcggctcccatagcaacaagaagcttttgtcctccttgggaatagacacccgaaacattctcttcacgggcaataagaagcagcctgttatagtgcccatgtatgcagcaggattgggtatgttagagcccaccaaggaaccactgaaaccactttctgctgcagaaaaaatagcttccatcggtcagacagccaccatgtcaccagatatgaacacatgtacatctgatcagttccaggagtctctaccacccgtccagtttgactggagtagcagtggccttactaaccctttagatggtgtggatccggagttgtatgagttaacaacttctaagctggaaatctccacctcaagcctcaaagtgactgatgcatttgcaagactcatgtctacagtagagaagacaagcacatctaccagtaggaaaccgaaaagagaagagcacctaagtgaagaagctatcaaggtgatcgctggccttcctgacttaacattcatgcatgccaaggtgttgatgttcccagccacgttaacaccttccacaagctctcaagaaaaagcagacggataactgatgtgaattggacagtttctattgcttttccttttttccatcccttccctaccatcaaaagcatacctgctctaattaaaaaaaaaaaaaaaaaaaattcaagttcagctgatttgttggtaagccgcactagaaaggtatacatagtaatgtatatttatttacatactgaagtcctaaatttatattagaaaaatgtaaataatcgggggtaaacatttttgaagatttattctttttgtgttgctggggtgtatacatttatgtctttgtgaaatacactggtggtgtccttcttacaaaacttttgaaataaaaaaaaaactcaaatcttcactgtctgtgaaatccccttcagtcttttcagattgcattgactgtcctcttgatttttcatattacatgtcaaattacttttgctatcataaataagctccaaagtcccccatttaatttttttttaattttgtgtatgatgggtttcagatctggcttttgttaacattttggggcttttttaatcttttcaatctggcgtattgctgtttgaccttttgcaaggtacttaattgctcttttgttatagggtatggatcattgtcagaacttgattggaggggtttaaagagattgtgtctgtttaaaatcagtatgattcagagaaggaccaaattatatgaatgtcttacaatggaatttacttgttactgatttttttgttctattgtaccactattttttgaggattttgcacagtgtaaaatgacataatcatagattgctatggtttaggctgtatatacagtgaaaactatgggttttaaatgtttggggaaattcctatggaaaaaagagagacatgtagaagaacctctaacaaggttaatgtgcatgcccaaggtcttttgaaatttcagtgtgtaaatttccttttagcttatacaaaaataaaataatttaaaagaaaaaaaaaaaaaaaaa

SEQ ID NO: 263 - DNA, 3064 bp, HOMO SAPIENS
gggcgccgggcgccgggcgcgcggtcctgcgaggagacgtggcagagtgcggcgcgctcgcgccggaccggaaagccggggaagtggccgaggagggagggctgcgagccatggcgaccaagacggcgggcgtggggcggtgggaggtagtgaagaagggtcggcggcctggggtcggcgccggcgccggcggccgaggaggcggcaggaaccgcagggcgctcggggaagcaaacggagtgtggaaatacgacctgacccctgcaatccagaccacaagcaccctttatgagcggggctttgagaatatcatgaagcggcagaataaggagcaggtcccaccccctgctgtggaacctaagaaaccagggaacaagaagcagccaaagaaggtggcaactcctcccaaccaaaaccagaagcagggccgcttccgcagcctggaggaagcactgaaagctctggatgtggcagacctgcagaaggaactggacaagagccagagtgtgttctctggaaacccatccatatggttgaaggacctggccagctatctcaactacaagctacaagctcctctaagtgaacccacgctgagccagcatactcatgattatccctacagcctggtgagccgggagctacgtgggatcatccgagggctgctggcgaaggcagcagggtctctggagctcttttttgaccactgtctgttcaccatgttgcaagagctggataagacaccaggggagtcactacatggttaccgcatctgtatccaggccatcctgcaagacaagcccaagattgccacggcaaacctaggcaagttcctggaactgctgaggtcccaccagagccgaccagcaaagtgtctcaccatcatgtgggccctgggtcaagcaggttttgccaacctcaccgagggactgaaagtgtggctggggatcatgctgcctgtgctgggcatcaagtctctgtctccctttgccatcacatacctggatcggctgctcctgatgcatcccaaccttaccaagggcttcggcatgattggccccaaggacttcttcccacttctggactttgcctatatgccgaacaactccctgacacccagcctgcaggagcagctgtgtcagctctacccccgactgaaagtgctggcatttggagcaaagccggattccaccctgcatacctacttcccttctttcctgtccagagccacccctagctgtccccctgagatgaagaaagagctcctgagcagcctgactgagtgcctgacggtggaccccctcagtgccagcgtctggaggcagctgtaccctaagcacctgtcacagtccagccttctgctggagcacttgctcagctcctgggagcagattcccaagaaggtacagaagtctttgcaagaaaccattcagtccctcaagcttaccaaccaggagctgctgaggaagggtagcagtaacaaccaggatgtcgtcacctgtgacatggcctgcaagggcctgttgcagcaggttcagggtcctcggctgccctggacgcggctcctcctgttgctgctggtcttcgctgtaggcttcctgtgccatgacctccggtcacacagctccttccaggcctcccttactggccggttgcttcgatcatctggcttcttacctgctagccaacaagcgtgtgccaagctctactcctacagtctgcaaggctacagctggctgggggagacactgccgctctggggctcccacctgctcaccgtggtgcggcccagcttgcagctggcctgggctcacaccaatgccacagtcagcttcctttctgcccactgtgcctctcaccttgcgtggtttggtgacagtctcaccagtctctctcagaggctacagatccagctccccgattccgtgaatcagctactccgctatctgagagagctgcccctgcttttccaccagaatgtgctgctgccactgtggcacctcttgcttgaggccctggcctgggcccaggagcactgccatgaggcatgcagaggtgaggtgacctgggactgcatgaagacacagctcagtgaggctgtccactggacctggctttgcctacaggacattacagtggctttcttggactgggcacttgccctgatatcccagcagtaggccctgccttcctggccactgatttctgcatgggtagaccatccaagactgcagcgggtagaaggtggcagttcttcatgggagtctttttaacttggtgcctgagttctctcctaggcaagtggccagttgcctccacctcagttcttccatctttggtggggacagggcccagcagcatctcagcctcctacccacaattccactgaacacttttctggccctactgcacatggcccccagcctccatccttgtgctggtagcctctcacaactccgcccttgccctctgccttccacttccttccatctcatttctaaaccccaaacagctcatctctaaaaagatagaactcccagcaggtggcttctgtgttcttctgacaaatgattcctgcttctccagactttagcagcctcctgttcccattcttggtcacagctctagccacagcagaaggaaaggggcttccagaagaatatagcaccgcattgggaaacagcagcctcacctccacctgaagcctgggtgtggctgtcagtggacatggggagctggatggaaatgcctctcacttcaaaatgcccagcctgccccaaatgcctctaagcccctccctgtcccctcccttgtagtcctacttcttccaactttccattccccatcatgctgggggtcttggtcacaaggctcagcttctctccactgtccatccctcctatcatctgtagagcagagcacaggcagttgtgtgccttgggcccagggaaccctccatcaacctgagacaggactcagtatatggttcttgggtatgccctaccaggtggaataaaggacacagatttgatttctagcaaaaaaaaaaaaaaaaaaaaaaaaa

SEQ ID NO: 264 - DNA, 4791 bp, HOMO SAPIENS
aagtgctaaagcctccgaggccaaggccgctgctactgccgccgctgcttcttagtgccgcgttcgccgcctgggttgtcaccggcgccgccgccgaggaagccactgcaaccaggaccggagtggaggcggcgcagcatgaagcggcgcaggcccgctccatagcgcacgtcgggacggtccgggcggggccggggggaaggaaaatgcaacatggcagcagcaatggaaacagaacagctgggtgttgagatatttgaaactgcggactgtgaggagaatattgaatcacaggatcggcctaaattggagcctttttatgttgagcggtattcctggagtcagcttaaaaagctgcttgccgataccagaaaatatcatggctacatgatggctaaggcaccacatgatttcatgtttgtgaagaggaatgatccagatggacctcattcagacagaatctattaccttgccatgtctggtgagaacagagaaaatacactgttttattctgaaattcccaaaactatcaatagagcagcagtcttaatgctctcttggaagcctcttttggatctttttcaggcaacactggactatggaatgtattctcgagaagaagaactattaagagaaagaaaacgcattggaacagtcggaattgcttcttacgattatcaccaaggaagtggaacatttctgtttcaagccggtagtggaatttatcacgtaaaagatggagggccacaaggatttacgcaacaacctttaaggcccaatctagtggaaactagttgtcccaacatacggatggatccaaaattatgccctgctgatccagactggattgcttttatacatagcaacgatatttggatatctaacatcgtaaccagagaagaaaggagactcacttatgtgcacaatgagctagccaacatggaagaagatgccagatcagctggagtcgctacctttgttctccaagaagaatttgatagatattctggctattggtggtgtccaaaagctgaaacaactcccagtggtggtaaaattcttagaattctatatgaagaaaatgatgaatctgaggtggaaattattcatgttacatcccctatgttggaaacaaggagggcagattcattccgttatcctaaaacaggtacagcaaatcctaaagtcacttttaagatgtcagaaataatgattgatgctgaaggaaggatcatagatgtcatagataaggaactaattcaaccttttgagattctatttgaaggagttgaatatattgccagagctggatggactcctgagggaaaatatgcttggtccatcctactagatcgctcccagactcgcctacagatagtgttgatctcacctgaattatttatcccagtagaagatgatgttatggaaaggcagagactcattgagtcagtgcctgattctgtgacgccactaattatctatgaagaaacaacagacatctggataaatatccatgacatctttcatgtttttccccaaagtcacgaagaggaaattgagtttatttttgcctctgaatgcaaaacaggtttccgtcatttatacaaaattacatctattttaaaggaaagcaaatataaacgatccagtggtgggctgcctgctccaagtgatttcaagtgtcctatcaaagaggagatagcaattaccagtggtgaatgggaagttcttggccggcatggatctaatatccaagttgatgaagtcagaaggctggtatattttgaaggcaccaaagactcccctttagagcatcacctgtacgtagtcagttacgtaaatcctggagaggtgacaaggctgactgaccgtggctactcacattcttgctgcatcagtcagcactgtgacttctttataagtaagtatagtaaccagaagaatccacactgtgtgtccctttacaagctatcaagtcctgaagatgacccaacttgcaaaacaaaggaattttgggccaccattttggattcagcaggtcctcttcctgactatactcctccagaaattttctcttttgaaagtactactggatttacattgtatgggatgctctacaagcctcatgatctacagcctggaaagaaatatcctactgtgctgttcatatatggtggtcctcaggtgcagttggtgaataatcggtttaaaggagtcaagtatttccgcttgaataccctagcctctctaggttatgtggttgtagtgatagacaacaggggatcctgtcaccgagggcttaaatttgaaggcgcctttaaatataaaatgggtcaaatagaaattgacgatcaggtggaaggactccaatatctagcttctcgatatgatttcattgacttagatcgtgtgggcatccacggctggtcctatggaggatacctctccctgatggcattaatgcagaggtcagatatcttcagggttgctattgctggggccccagtcactctgtggatcttctatgatacaggatacacggaacgttatatgggtcaccctgaccagaatgaacagggctattacttaggatctgtggccatgcaagcagaaaagttcccctctgaaccaaatcgtttactgctcttacatggtttcctggatgagaatgtccattttgcacataccagtatattactgagttttttagtgagggctggaaagccatatgatttacagatctatcctcaggagagacacagcataagagttcctgaatctggagaacattatgaactgcatcttttgcactaccttcaagaaaaccttggatcacgtattgctgctctaaaagtgatataattttgacctgtgtagaactctctggtatacactggctatttaaccaaatgaggaggtttaatcaacagaaaacacagaattgatcatcacattttgatacctgccatgtaacatctactcctgaaaataaatgtggtgccatgcaggggtctacggtttgtggtagtaatctaataccttaaccccacatgctcaaaatcaaatgatacatattcctgagagacccagcaataccataagaattactaaaaaaaaaaaaaaaaaaaagacattagcaccatgtattcatactaccctattttcacttttaatagtattataaacttcatgaacttaattagtgtatttttacagtatacttttgagtttgttaaaatatgatgatattagtgattggtttggttcagttccagaatctttgactagttacagatttgatagcacttaaatgtaattgaatagcttatgcttcattgcttgggcatatccagcatgttatgaactaataactattaaacttgacttaaccagtcattcattaataatttttcaaggataacttagtggcctcctaaagacacttgttttggcactgaccagtttttagccaatttaatctgtatctagtataaataattctcatttttctttgatgatattaacagagtgggcttttccttttgcataaaggctagtaactgtatatgtagcatggatttaattagtcatgatattgataattacaggcagaaaatttttaatcaaatgattagagcttaaatatttgcaggcaagtttttttttttcctttaagaaaaggaaaaagtacacattcactagaattcttcagaaaatttagtggtgccagtttccatttggtatttccttattaaaatattctagaattttaaggagattgaagggaatcacagtggggtggggagacctgggtttggggaatgacagagagaagaggtggtgagggcctgattaaaaactaagcagaagtagttttaacaaaaatactcatgaaaatgtttggaaactgaaatttaaacaactgtaatattaaggaaaccagaatcaataaatcactgtcttgccagcacagctacagagtaacatgattcaggggaggaaaagttccttagagttacttttataattctttttttttttcctcttaggtttagaaatcttacaaatttaaactttatccttttaaaattatttgaacataatttagatattgtaagcttaaaatacaaatgtttatagataacctctttaccataaactaatccctggcaagccatggctctctttttttttttggtgtttaaagcctgtaaacagtttttctgaatgatcatgaacttttcttggtttagcactaggatttagctatgaagagagctcataggctttcaggtgctaattgagatctgccctgttagagtcttggggtgctagattggtcacattgacaccagtggcagggaaggcatctatgagtttgatgctttttatcacacacttcagtgtttagaaagttattaccaatacttttaaacaacactccaagaaaatttgctatatttctttctcatcactacagagagagtagatttccccatagagagcacagcctccattagtaaggttggtgactattggtaagaggtggacttcattgacaccaagtgggaggtagggaaagcccagaaatggcaggatgatatggtggttctgtcgttgggaaaggtattgggttttgctgtttgtatttatactgtataatagataccacgctttttcttattatctgtatatgtattgcttttcatgtttgatattttcccatgccaagatttgtttatatatattttcaatgttaaattaaattgatttgggtaactttcttcccca

SEQ ID NO: 265 - DNA, 3112 bp, HOMO SAPIENS
aggtcttccaccagctcctcccctctacaggcccctcctactcttccctctcctccccgtcccctcccctgcaacagcctcccccattcacctcccttctcccctccctcctcccctcccacctcccctcctttcccctccctctcctcccctccctccttccccctcctttcccctccctctcctcccctccctccttccccctcctttcccctccctctcctcccctccctccttccccctcctttcccctccctctcctcccctccctccttccccctcctttcccctccctctcctcccctccctccttcccgcttcccctcccctccctcctcccctcctttcccctccctcctcttttcccctcccctccctcctccccctcctccccctactctcctcctttcccctccctccttccctcctcccctccctccttccctcctcccctcccccgcccacgccgcagccacaaaatggcggcgggtgggagcggcgggcgtgcgtcgtgcccgccgggggtcggggtcggcccgggcacggggggcagtcccgggcccagcgccaacgccgccgccaccccggcccccggcaacgcggccgccgccgccgccgccgccgccgccgccgccgccgcccctgggccgacgccgcccgccccgccgggccccgggacagacgcgcaggccgcgggcgcggagcgggcggaggaggcggcgggcccgggggcggcggcgctgcagcgcgaggccgcgtacaactggcaggccagcaagcccaccgtgcaggagcgcttcgccttcctcttcaacaacgaggtgctgtgcgacgtgcacttcctggtgggcaaggggctcagctcgcagcgcatccccgcgcacaggttcgtgctggccgtgggcagcgccgtctttgatgccatgttcaacgggggaatggccacaacatccacggagattgagctgcccgacgtggaacccgccgccttcctcgcactgctcaagtttctctactcggacgaggtgcagattggcccggagacggtgatgaccacgctatacaccgccaagaagtacgcggtgccagcgctcgaggcccattgcgtggagttcctgaagaagaacctgcgagccgacaacgccttcatgctgctcacgcaggcgcgactcttcgatgaaccgcagctggccagcctgtgcctggagaacatcgacaaaaacactgcagacgccatcaccgcggagggcttcaccgacattgacctggacacgctggtggctgtcctggagcgcgacacactgggcatccgtgaggtgcggctgttcaatgccgttgtccgctggtccgaggccgagtgtcagcggcagcagctgcaggtgacgccagagaacaggcggaaggttctgggcaaggccctgggcctcattcgcttcccgctcatgaccatcgaggagttcgctgcaggtcccgcacagtcgggcatcctggtggaccgcgaggtggtcagcctcttcctgcacttcaccgtcaaccccaagccacgagtggagttcattgaccggccccgctgctgcctgcgtgggaaggagtgcagcatcaaccgcttccagcaggtggagagtcgctggggctacagcgggaccagtgaccgcatcaggttctcagtcaacaagcgcatcttcgtggtgggatttgggctgtatggatccatccacgggcccaccgactaccaagtgaacatccagattattcacaccgatagcaacaccgtcttgggccagaacgacacgggcttcagctgcgacggctcagccagcaccttccgcgtcatgttcaaggagccggtggaggtgctgcccaacgtcaactacacggcctgtgccacgctcaagggcccagactcccactacggcaccaaaggcctgcgcaaggtgacacacgagtcgcccaccacgggcgccaagacctgcttcaccttttgctacgcggccgggaacaacaatggcacatccgtggaggatggccagatccccgaggtcatcttctacacctaggctgcccgacaccgacaccgccctccctccgtggggatagccgcagccccaggccatcatctgctgctggggcccccccaccacgcggtgccaggcccagtgtcccccaggccgtctgtccactccatgccacctttctcagcatcaggacggggttgccctgtgttcaccacgagtgtggctgctggatcagggcagccggggaggtggccaggccagtggccaggccctgtggagacaatccctcaggactagggacagggctgtgccggcctgggccagggcccacggacccgcagctcagggcgcctgcccacgtcgtctgccggcggtgcgccgcgggcgtccctcgcgtctcttcactgcacattgcaatgcatttgcgattcccatttctctgctaggagccagcctgggtggcgctgctcccagagccgtgggtcccagaccttgcgttccttttgttcctgtccgtttatcaggacacgggccccacctgtcacgtgcccgaggccacccaagcccagcctgcggggcgttcccactgcctggatgccggcttgagttctgcgcacgcaggattcagtgtggggacggcccctgccggataggcctagccctggcccaggtggtgagcggtttgcagtgtccgttctcatccacctgatgggcccagataaaggcccccgctgtccagcctccctggacggccctcgcggtccctgcagcccaagatgggactcagaccctgtgccccagagctcccctgccgcagaatggggccccagccggccccgaccgggtccaggagcactgctcgcctgtacatactgttgccctagcccacctggtgccgtgggagccacccccaggtgctgggggcacagcccctccccactccggccacgcccccacccaccccgcgtgtttctgccctgtgactcctggaacctgcgtcctccccaaagccatgggaggggtgtcctcctcagaccatgcccccagatgatttttttaaataaagaaacaaatgcacctgccttgagcgcacactg

SEQ ID NO: 266 - DNA, 3941 bp, HOMO SAPIENS
tcttacctcacaaaggtagctcctccgccggcagcaactcggcgcccgcggtccatggaccggaacctcgggccgacggacgggaacccgggccgcgatcgccgcctccccgcctcaggctcctcctcctcgctctccgccgcctccgccggactcccgcaggccctgcaccgccgccgccaggctagcggagctgccccgggaagctgggtgacgggttcgcggctgccgccggactgcggcctactccgccgcctctcagtgctattgtccctgggcctggccttgagcgggtccactggggaaggccgtgtgcgccggctccgcggaagatgccggaccaagccctacagcagatgctggacagaagttgctgggtttgttttgctactgatgaagatgatagaacagctgaatgggtgagaccatgcaggtgcagaggatctacaaaatgggttcaccaggcctgtctacaacgctgggtggatgaaaagcaaagaggaaacagtacagccagagtggcatgtcctcagtgcaatgctgaatacctaatagtttttccaaaattgggtccagtggtttacgtcttggatcttgcagatagactgatctcaaaagcctgtccatttgctgcagcaggaataatggtcggctctatctattggacagctgtgacttatggagcagtgacagtgatgcaggttgtaggtcataaagaaggtctggatgttatggagagagctgatcctttattccttttaattggacttcctactattcctgtcatgctgatattaggcaagatgattcgctgggaggactatgtgcttagactgtggcgcaaatactcgaataaactacaaattttaaatagtatatttccagggataggttgtcctgttcctcgaattccagctgaggccaatcctttagcagatcatgtctctgctactcgaatcttgtgtggagcccttgtctttcctactattgctacaatagttggtaaattgatgttcagtagtgttaactctaatttacaaaggacaatcttgggtggaattgcgtttgttgccataaaaggagcatttaaagtttacttcaaacagcagcaatatttacgacaggcacaccgcaaaattctgaattatccagaacaagaagaagcataaaactgacttctggttgttctgcagttctctcatccttatgaatctgttgtgttgttttgattccatcattaatgcacttgtggagacttgtgataagctgctgctcctatattttttaagaaatataataaagcacttagggcaggggaaatcatctcggtaatcatggaacctaaggatgtgatttgttttcattgtttgtatgtactacttttatggcagtcatatgaaccattatcttagcatggtaaacctgggttttgttcatattttctccagacagaaatgcaaagatcaaactgtgcaaatattaaaaaaatgcacatgctgttttattcaaatgcctcttttgtacatgttcatgtttagtgttttctcagaatcagcaactcaaggtactatgaggatttttctcactgacataatttgattacatactaaataagaggatatgttaatatgaggaaatgtaaattaaattagttataaataaataaccaaaaatgtatgtaaacattcaaatgattatctgaacaaatgagattttgtggtgttttctttaacccatgtgatgtcctccaaaatgtgtagggtaaaaattcacagggcttccagatcactttttcaatattaaattttatttacataatgttgacatctcatacttcatgaagtaattttgactcatgcagtcgtgtgtgtgtgtgtgtgtgtgtgtgtgtgtgtgtgtgtatttgtgtgtttcagtgtttcatcaggtccttccatctctgggagttttttcaacccatatttctagaaattacagctgccagtttatagtagtttgagcagaggatgatttgcaaaaataaaaataaagttattttactctcctcttgcattgattcagttattgagatattcgttgatcacctcctatttcccaggcactgtgcagagtgctgtaggacatagtggtgaacaagacagacttggtccaagctcttacagagttgacagtctagtttcagcacatagaaaaccagcagtgaataaaccaaggtgaggccttgagctctttgtttttatattaatgaggagaaaagtatgaaaacaagaagtcttaagtaaatattgaggtcattgtttttggcttaagtttattatagaaaatcaacactaatgtttttagattttaattgtcctattgatgaggctagcaccttaatcactgtttagttttgtattcatttttaaaagcaattattgaagccattttcaatagattggccattttaatgttcagcaacctgaatggttatttttgttaattaaaattaaatttttaagagatattttcaaaaccctatttattttcttgttcacagtaatgcatgtcaataataaatgtttccccttactgataagcggccactttaggagtgtagcaaatatagattgagctatgttagtttgcaataatatatgttaactttagtaattaaagactggtttctatagtatgaatgtcttaattttgagttatatgatgtttatttgaatgactgttgaacattcaaatttgtattatttggagatgaagatttgactaacagtgagccttattaagaacactactacagttctgaaggggaaatataacatctatggttatatattttaaaaacttagattataggctgtaattataaaatatattggcttttgttttcaatgtgaaagatacattaaatggacacatatcttgcaaaattttgttgtatagaacagtttttaggcagcctttactaaagttatgcaaacacacagttccccatttactacattaatgcccttgacagggagtagctgcttggttttataggtattagggctcatgaaggccggggaacaactctaatccttttggggcaggagggagggtttttttagggttgcggggagggaactgcaagtgcctgaggaccagagtggcctctagccccgaattgaacacttttaaacctaaagagccttattattattagctcgagaaataccacatgccagtcttcccaggaaggtgacctgcctgaccatgaagcaacaaaagagcataggcagacttaaagttggatagacctgggttcaaatcatagttcagctttcaataactgtatgtatgattttggctaaaggatttgactttctctcaactgcagttttcttaatctttgaaatgcaaataatgtttatctcagaagactatttctaggattaactgagagattaaaggaacagcagcacttaggctcaaaatcgcccctacaaagcagtagttgtttcttaattgctaagtaatctgtttgcactctaggaaaagtaaatggagaggtaaaagaaaggcattggggacaaatgaaagagatgatgtagatttttcggatgggtgggtatattttattttccagtttattttcatatttctttactgtgttatttctggaaactttaatgttttaaacctcttttataaaattcaatgacgactactagaattcttttcaaaagttaacttatctccaaagtggctgaaaatattgtttaccattacatgattatgaaatgactgtgaagaatataaaattaaacttagtgacttaattagtcactgccttgctaactttgctgtaatttttttaaacgtcttgtttttaatatagcaaactatctcaatactggctggattaggttaaataaagaatttttatgttcaaaaaaaaaaaaaaa

SEQ ID NO: 267 - DNA, 3393 bp, HOMO SAPIENS
gtttccgggacgttcggagggtggcctctctcccaccgggttccgcataccccaggcaccggcccgcatccaagtgtcaggttggagccgggaagcggccctggtggtagcggcggcgggggcaggatgagcgcggaggcggcggaccgggaggcggccacctccagccggccctgcaccccgccgcagacctgctggtttgagtttctgctggaggagtcactgttggagaaacatctgcgcaagccctgcccggatcctgcaccagttcaacttatagttcagtttttggaacaggcttccaaaccttcagttaatgaacaaaaccaagttcaacctccgcctgataacaagagaaatcgtattttaaaactacttgctcttaaagttgctgcacatttgaagtgggacttagacatattagagaaaagtttgtctgttccagtattgaatatgctactaaatgaactactctgcatcagtaaagttcctcctgggacaaagcatgtagacatggatctggccactttacctccgaccactgccatggctgtacttctctataatagatgggcaattaggacaattgttcaaagtagttttccagtcaaacaggcaaaacccggaccccctcagttaagtgttatgaatcaaatgcaacaggaaaaagagctaacagaaaacattttgaaagtgctcaaagaacaagctgctgattctattttggtactagaagcagccctaaaattaaacaaggatctttatgtccatacgatgagaactctagatttattggccatggaaccaggcatggtaaatggagaaactgagagttctactgctggattgaaagtcaaaaccgaagaaatgcagtgccaggtgtgctatgatttgggcgcagcatacttccagcaaggctccacaaattcagctgtctatgaaaatgccagggaaaaattttttagaaccaaagaactaattgcagagataggttcattatctcttcattgtaccatagatgagaagcggttagctggctattgtcaagcatgtgatgttcttgtaccttcttctgatagtacatctcaacagttgactccatatagtcaagtccatatttgtttgagatctggcaactatcaggaggtaatacagattttcattgaagacaacttaaccttgagtttacctgtccagttccgacagtcagtcctaagagaactctttaagaaagctcaacagggaaatgaagctctagatgaaatctgttttaaagtttgtgcctgtaatacagtccgtgatatactggaaggcagaacaattagtgttcaatttaaccagctatttcttagaccaaataaagagaaaatagactttcttcttgaggtatgttcaagatcagtaaatttagaaaaagcttcagagtctttgaaaggaaacatggctgcttttctaaagaatgtgtgtctggggttggaagatctgcagtatgttttcatgatttcttcacatgagcttttcattacattgttgaaagatgaagaacgaaagctacttgttgatcagatgaggaagagatcccctagagtaaatctgtgcattaaacctgtaacttcattttatgatatcccagcttcagcaagtgtcaacattggtcagttagagcatcaacttatattgtcagtggatccttggaggattagacaaattttaattgaattacatggtatgacttcagagcgccagttctggacagtgtctaataagtgggaagtaccttctgtctatagtggtgttatcctgggaattaaagacaatttaacaagagatttggtttatattcttatggccaaaggtttgcactgcagtactgttaaggacttttcccatgctaaacagctctttgctgcttgtttggagttggtaacagagttctcaccgaagcttcgtcaggtcatgctgaatgagatgttgcttttggatattcatacacacgaagctgggacagggcaggcaggagagagaccgccatccgaccttataagtagagtacgaggctatctggaaatgaggcttcctgatattcctcttcgtcaagttatagctgaggaatgtgttgcctttatgttaaactggagagaaaatgaataccttacactccaagttcctgcatttttgcttcagagtaatccatatgtaaagcttggacagcttttagcagctacatgcaaagaacttccaggccctaaagaaagcagacggactgccaaagacctttgggaagttgttgttcaaatctgtagtgtgtccagtcagcacaaacgaggaaatgatggcagagttagtttaataaaacagagggaatctacgttaggtatcatgtatcggagtgaactgctttcttttatcaaaaaattacgagaaccactcgttttgactattattttatcactctttgtgaaacttcacaatgttcgggaggacattgtgaatgatattacagctgaacacatttctatttggccatcttccattcccaacctccagtctgtggactttgaagctgtggcaatcacagtgaaagagctagttcgatatacactcagtataaatccaaataaccattcttggttaattatccaggcagatatttactttgcaacgaatcagtattcagcagctcttcactattacctccaggcaggagctgtgtgttctgacttctttaacaaggctgtgccccctgatgtttatacagaccaggtaataaaacgaatgataaaatgttgttctttgctgaattgccacacacaggtggctattttatgtcagttcctcagagaaattgactacaaaacagcgtttaaatctctgcaagaacaaaacagtcatgatgctatggactcctactacgactacatatgggatgttaccattttggaatacttgacttatcttcatcataaaagaggagaaacagataaaagacaaattgcaatcaaagccatcggccagacagagttgaatgcaagcaatccagaagaagtgttacagctggcagcgcagagaaggaaaaaaaagtttctccaagcaatggcaaaactttacttttaagcagttaaatttttttaacttttattttttaaacaatgggctaaaaataaacagtattaaaaggttaagtttatataatacatatgtacacaattagtggtgttttcttttcagacaaaatactgaaacaaatattagtttaaaaacaaactatacagaagacttcataccgtaacaataaatgtatagtttcttcaaagggagaagagattcacatatctgataacaaaataaactagcaatctagttttctaatctaaaaaaaaaaaaaaaaaaaaa

SEQ ID NO: 268 - DNA, 1042 bp, HOMO SAPIENS
ggaaaaacacgatcggaggcgggccctggacaggaacaagaagggtgggcttgactgggcggcccgcggtcttggctcccctttcttccttctggctggccggccgcagggtagggggtccgtggacctcccggcctgtagggggcgtcgggcgcagcggaagggcctgctccggagcctggccagggctgcgcagtcatgatcaccgagaccgcggcggagcctacggtccctgcagtgcctgctgctgaggaggccaccgaagctcggggacgcgaggagccggcgtggccctggaaagacgccccgatccggacgctggtgcagcgcatccaccagctgcaggctgagcgcgcgcagggcttccgccgactggaggagtggttggcgccggtgcagggcctgagagcctgggggcgcggcctcagggtccccacatgccgcagaggccaccgccagtacctgcgcagcggccctgactacgacttcgcgcgctaccggagcacagtgcacggggtgacccaggccttcgccgccgcctcgcgggaggtgctggcggtggaagcagagctgggcgggcctcgcaggcagccgctgctcgccggccacgtgcgcagcctgcaggagctggagcagacgcggctgggcacggtggccctgctgcagttgatggagacgccagagctggcggggcaggaggacgctgtacggatgcagcagctgaaaatgaaggtaattaaaaccatggaggcgatcagcgaggttctccaggaccttaggtttgatgcggaatctgccgagtgatggcggctccccagggatgcgccgagggagatgggaaacggggcggatggcgcccagcccagccctaactgccagctggctggggtcgcgccccactgcgctgctgaccttcctgcagttccagacacctcccacaataaagagctcctcctctgtagccgctctgccatctctgtgtacaagggtgctgcagccagtgtgcctagggagggggcccccacagggccagggattgtgg

SEQ ID NO: 269 - DNA, 1772 bp, HOMO SAPIENS
gcattgtgggaagggcggccggtgcagccgcagctgccatcttaggggcgcctggcgctacgggtttctcgttggaggcggccttcgtggcagctgtagacgccgggaaaaggcataaagtccgttggccgacacctttctttcctccggcctcggtagaaccgccagcccgcgtccgaaggcggaggcgaggggaactggccgcgtgaggggcctgaggcgagcggttagagcgtctcccggaaggatgggccggtctcggagccggagctcgtcccgctccaagcacaccaagagcagcaagcacaacaagaagcgcagccggtcccggtcgcgatcccgggacaaggagcgcgtgcggaagcgttccaaatctcgggaaagtaaacggaaccggcggcgggagtcgcggtcccgttcgcgctccaccaacacggccgtgtcccggcgcgagcgggaccgggagcgcgcctcgtccccgcccgaccgcatcgacatcttcgggcgcacggtgagcaagcgcagcagcctggacgagaagcagaagcgagaggaggaggagaagaaagcggagttcgagcggcagcgaaaaattcgacagcaagaaatagaagaaaaactcatcgaggaagaaacagcacgaagagtagaagaattggtagcaaaaagggtggaggaagaactggagaaaaggaaggatgaaattgaacgagaagttctccgaagggtggaggaagccaaacgcatcatggaaaagcagttgctcgaagaactcgagcgacagagacaagctgagcttgccgcacaaaaagctagagaggaggaagaacgtgcaaaacgtgaggagctagagcgaatactggaagagaataaccgaaaaattgcagaagcacaagccaaactggccgaagaacagttgagaattgttgaagaacaaagaaagattcatgaggaaaggatgaaactagaacaagaacgacaacgtcaacaaaaagaagaacaaaaaattatcctgggcaaggggaagtccaggccaaaactgtccttctcattaaaaacccaggattaaattgcaaactctgaactttttacaaagaaaaatggaaaaactttgtatggtagcttcatgttgaagtggttttttgtttttgtttttgtttttttaatttgtaaaatctggaaagttagcttgttctaataggggctatgctctgcaattccctttttttttttttttttccttccactaagtcaaatccttatcagatcattgttgtattctaaggagtgacgtatttttcacctgtttggattctatattagtggtctgaggaagagcagatcacattgtaaaactatggatggtctgataaggcttttactgaccccactgacttcagagttatactctgtttgctacatcataatgctggttttgctgactttttgtttttttatatatttataaaaaaagaaaaagttggtgattgcattgggaaattcccagggtattactggacctatgtggtgtattgttaaaccagtgtccttgtgatactgttgctcttgatgttcctgatacaggtaaggaaacagttggtcaactctgatacaaagtatatatacagttcagtattgtctctgttcattttgtttttatttcattgacaaaatcaaaccagcattccccattgtgtaaataaatgattttgctgaataaagtaaagtcttaaattcatatgttgaagcaaaaaaaaaaaaaaaaaaaaaaa

SEQ ID NO: 270 - DNA, 7995 bp, HOMO SAPIENS
agtgccctgggacacctcttcagtccgtggactttcccgctgcacactgccctccgaagtcggggacgcgggctcgtgagatggaagattttcgaggtatagcagaagaatcatttccaagctttctcaccaattcattatttggtaacagtgggattttggaaaatgtcactctttcttcaaatcttggcttgcctgttgctgtttctacacttgctagggatagatccagcactgataacaggtatcctgatatccaggcatcttacttagtagaagggagattttcagttccatccgggtcatctcccggaagccagagtgatgctgaaccaagagagaggttacagcttagcttccaggatgatgattctatctctaggaaaaagagctatgtggaaagtcaacgtttgtcaaatgctctcagcaaacagtcagctttacaaatggagacagcaggaccagaagaggagccagccggagctacagaatccttgcagggccaagatctcttcaacagggcttcaccactggaacaagcacaagactcacctattgattttcatttacagtcatggatgaataataaggaacccaagattgttgtgcttgatgctggaaaacattttgaagacaagactctaaagagtgacctaagccacactagcttattagaaaatgagaaacttatcttaccgacaagcttggaagattcttctgatgatgatattgatgatgaaatgttttatgatgatcatttggaggcttattttgaacaactggcaattccaggaatgatatatgaagacctagaaggaccagaacctccagaaaaaggttttaagttacctacaaatggtcttagacaggcaaatgaaaacggtagcttaaactgcaagtttcaatcagaaaataacagctctctgatttccctcgactcacactcttctgaaacaactcacaaagagtctgaggaaagccaagttatttgtctacctgggactagtaattctataggtactggagatagtagaaggtacacagatggtatgttaccattttcctctggtacttggggaactgagaaagaaatagaaaatttgaagggtattgttccagatcttaacagtgaatgtgcaagtaaagatgttctggtgaagaccctcagggctattgatgtgaaacttaactctgataattttcatgatgcaaatgccaatagaggtggttttgatctgactgaccctgtaaaacagggggcagagtgtcctcaccaaaataagacagttttgcacatggatggatgtttagacactgagactcctacggtgtccattcaagaaaatgtggatgtagcctctttgaagcccattagtgacagtggaattaatttcactgatgccatttggtcaccaacttgtgaaaggcgaacatgtgaatgtcacgagtccatcgaaaagaataaagacaaaacagatctcccacagagtgtggtctatcaaaatgaagagggtaggtgggtcacagaccttgcctattacacatcttttaatagcaaacaaaatttaaatgtgtctctaagtgatgagatgaatgaagacttcagatctggttctgaagcatttgatttgattgcacaagatgaagaagaatttaataaagagcatcaatttatacaggaagaaaacatagatgctcataatacttcggttgcactgggcgatacgtcctggggagctacaattaattacagtctgttgaggaaatcacgtagcacatcagatttggataaagatgatgccagttatttacgtctgtctttaggagagttctttgctcaaagatctgaagctcttggttgccttggtggtggtaacaatgtgaaaagaccatcatttggctattttattagatcaccagagaagagagaacctattgccttaataagaaaatctgatgtatcaagaggtaatttggaaaaagaaatggctcatcttaaccatgatctatattcaggagatttaaatgaacagtcccaggcacagctaagtgaaggatcaattacacttcaggttgaagcagtagagagtacttcacaagtggatgaaaatgatgtgacgttaacggctgataaaggcaaaacagaggacactttcttcatgagcaacaaaccccaaagatacaaagacaagctaccagatagtggtgattctatgcttaggatcagcaccattgcttcagccattgcagaggcatcagttaatactgatccttcccaacttgctgcaatgatcaaggcactttcaaataaaaccagagacaagacttttcaggaagatgagaaacaaaaggactattctcatgtgcgtcatttcttacctaatgatttagaaaaaagtaatggatccaatgcacttgatatggagaaataccttaaaaaaacagaagttagtagatatgaaagtgcattggaaaacttttcaagggctagtatgtctgatacttgggatttatctttgcccaaagaacaaactactcaagacattcatccggtggacttaagtgctactagtgtaagtgtgagggcaccagaagaaaacacagcagctattgtttatgttgaaaatggagagagtgagaatcaagagtcatttagaaccataaactcctcaaattcagttacaaatagagagaataacagtgcagtagttgatgtgaagacatgttccattgacaacaaattacaagatgttggtaacgatgaaaaagctacctcaatttccactccatctgatagttattcatcagtgaggaaccccagaataacatccctttgtctgttaaaagactgtgaagaaatacgagataacagagaaaatcagaggcaaaatgagtgtgtcagtgaaataagcaacagtgagaagcatgtgacttttgaaaaccatcgcatagtctcacctaaaaatagtgatttgaaaaatacctctcctgagcatggtggacgtggctcagaggatgagcaggagagcttcagaccttccacgtcaccactgagtcattcttctcctagtgaaatttctggaacgagttcatcagggtgtgcgttagagtcctttggttcagcagctcagcagcagcagcctccctgtgagcaggagttgtctcccttggtgtgctcgcctgctggggtgagcaggctgacgtatgtgtctgaaccagagagctcctatcctaccacagccacagatgatgccctggaggaccgcaagagtgatatcaccagcgagttgagtaccacaattattcaaggcagtccagccgcattggaggaacgggctatggaaaaattgagagaaaaagttccatttcagaatagaggaaaaggaacattatcatctattatccagaataactctgatacaagaaaagcaactgaaactacttctctgagtagcaagcctgaatatgtaaaacctgactttagatggagtaaagatccttcctccaaaagtggaaatctgttggaaaccagtgaggtaggttggacatcaaaccctgaggaattggacccgatcaggctggctctcctgggcaagtcaggtctgagctgtcaggtggggtcagccacatcacaccctgtgtcctgccaggagcctatagatgaagatcaaagaataagtcctaaagataagtcaactgctggccgtgagttcagtggccaggtttctcatcagaccacctctgaaaaccagtgtactcctattcccagcagcacagttcacagctctgtggctgacatgcagaacatgcctgctgctgtgcacgcactcttgacacaaccctctctcagcgctgctccttttgctcagcggtatttgggaacactcccttcaactggaagcaccaccttgcctcagtgccatgctggcaatgccacagtctgtggcttctcaggaggccttccctatccagctgttgcaggagagcctgtgcagaactctgtggctgtgggaatttgtctaggatcaaatatcggctctggatggatgggtacctcttccctctgtaacccatattctaataccttaaatcagaacctgctaagcacaacaaaaccttttcctgtgccgtctgttggtacaaactgtggaattgaaccatgggattcaggagtgacatcaggattggggagtgtccgagtgcccgaggagttgaagcttcctcatgcttgctgtgtcgggatcgcttcccagaccctcctcagtgtgcttaatccaactgaccgctggctgcaagtcagcattggggtcctcagcattagtgttaatggtgaaaaggtggatctttcaacatatcgttgtttagttttcaagaataaagccatcataagacctcatgccacagaagagataaaagtgctttttataccatccagtcctggggttttcagatgcacattcagtgttgcttcttggccatgttcgacagatgctgagaccatcgtacaggcagaagctttggccagcaccgtcactctcactgccattgccgagagtcctgttattgaggtagaaacagaaaagaaagacgttcttgattttggtgacttgacttatggaggctggaaagccctcccactaaaattgataaaccgaacgcatgccactgtgccaattagactgattattaatgctaacgctgtagcctggcgctgtttcacgttttccaaggaatccgtccgagctcctgtggaagttgctccttgcgctgatgtggtcactcggctagcaggcccttctgtggtcaaccacatgatgcctgctagttatgatggacaggatccagaatttctgatgatttgggttcttttccatagtccaaagaaacagatcagctcttcagatattctggactcagcagaagaattctcggcaaaagttgatatcgaagttgacagcccaaaccctacgcccgttcttagaagtgtgagtctccgagcaagagcaggaatagctaggatccatgctcccagggacttgcagacgatgcatttcttggccaaagtggcttcctcaagaaagcagcacttacctttgaaaaatgctgggaacattgaagtttatttggatatcaaggtcccagaacaaggaagtcacttttcagtggatccaaagaatctactccttaaacctggagaagaacatgaggttattgtttcatttactccaaaggatcctgaagcctgcgaggaaaggatcttgaaaatatttgtgcagccatttggacctcagtatgaggtagtgttaaaaggcgaagtcatttcttcaggaagtaaacctctgtcacctggaccttgcttagatattccatcgattttgtccaacaaacaatttctggcttggggaggagtccctctaggtagaacacagcttcagaaactagctttaagaaataattctgcatctacaactcaacatttacgactgcttattagaggacaagatcaggactgctttcagcttcagaacacttttggttcagaacagcgattgaccagtaactgtgagatcagaattcacccaaaggaagacattttcatctctgtattatttgcacctactcgattatcttgcatgttggctagactagaaatcaaacaacttggaaatcgatcacaaccaggcattaagttcacaatacctttgtctggatatggaggaacaagcaatcttattttggaaggcgttaaaaaattatctgacagttacatggtaacagtgaatggcttagtacctggcaaagaaagtaaaattgttttttctgtccgcaacactggctcccgagcagcttttgttaaagcagtaggttttaaggattctcagaaaaaagttttgctggatcctaaagtattgaggatttttccagataaatttgtactcaaggaaagaacacaagaaaatgttactttaatatataatccatcagacagaggaatcaataataaaactgcaacagaactatcaactgtatacttatttggtggagatgaaatttcaagacagcagtatcgcagggccctgttacataaaccagagatgataaaacagatacttccagaacatagtgtgcttcaaaacattaattttgttgaagcatttcaagatgagctattagtaactgaagtatatgatcttccccaacgacctaatgatgttcagctcttttatggaagcatgtgtaaaattatactttcagtaattggagaattcagagattgcatttctagcagagaattccttcagccttcttccaaagctagcttggaatctacaagcgacttgggagcttctgggaaacatggtggcaacgtctctttggatgttttaccagtcaaaggtcctcagggttctcctcttctctcacgggcggctcgcccgcctctggatcagctggcctccgaagagccgtggactgtcctacccgagcacttgattctggtagctccttctccttgtgacatggcaaaaactggacgtttccagattgtgaataactctgtgaggttactgagatttgagctgtgctggccagcgcattgcctcacagtcacgccgcagcatggatgtgtcgcgccagagagtaaactacaaattcttgtgagtcctaattcctccttatccacaaaacagtcaatgttcccgtggagtggtttgatctatatacactgtgacgatggacagaagaaaattgtgaaagttcaaattcgagaagatttaactcaagtggaacttttaactcgtttgacctccaaaccatttggaattctttccccagtatctgagccttcagttagtcatttggtcaaaccaatgacaaaaccgccttccacaaaagttgaaataagaaacaagagtattacttttcctacaacagaacctggtgaaacttcagagagctgtctagaactcgagaatcatggcaccacagacgtgaaatggcatctgtcatctttagcgccaccttatgtcaagggagttgatgaaagtggagatgtttttagagctacctatgcagcattcagatgttctcctatttctggtctgctggaaagccatgggatccaaaaagtctccatcacatttttgcccagaggtaggggggattatgcccagttttgggatgttgaatgtcaccctcttaaggagcctcacatgaaacacacgttgagattccaactctctggacaaagcatcgaagcagaaaatgagcctgaaaacgcatgcctttccacggattccctcattaaaatagatcatttagttaagccccgaagacaagctgtgtcagaggcttctgctcgcatacctgagcagcttgatgtgactgctcgtggagtttatgccccagaggatgtgtacaggttccggccgactagtgtgggggaatcacggacacttaaagtcaatctgcgaaataattcttttattacacactcactgaagtttttgagtcccagagagccattctatgtcaaacattccaagtactctttgagagcccagcattacatcaacatgcccgtgcagttcaaaccgaagtccgcaggcaaatttgaagctttgcttgtcattcaaacagatgaaggcaagagtattgctattcgactaattggtgaagctcttggaaaaaattaactagaatacatttttgtgtaaagtaaattacataagttgtattttgttaactttatctttctacactacaattatgcttttgtatatatattttgtatgatggatatctataattgtagattttgtttttacaagctaatactgaagactcgactgaaatattatgtatctagcccatagtattgtacttaacttttacaggtgagaagagagttctgtgtttgcattgattatgatattctgaataaatatggaatatattttaatgtggtatatccagaaaaaaaaaaaaaaaaaaaaa

SEQ ID NO: 271 - DNA, 3281 bp, HOMO SAPIENS
ggcaggggcgcatccctcgccacccgcggtcgcccagcacgccgggacgcgcgtggccatccagctccccgggggcgttggggggctccgcgggcctgggcctcgggattcgcccgccgcttccccggggagccgctgctgcaaagccaggttggggcgccgggcccggccagcgccctctaggcagcggaagtgcagcttgctttacatccgtcctccccgcctcgcagagttgggagaaggcagggtggggggtgtggaaaaataaaaggaaaagtccttgcaccatgtagatcagcgtcccccactttggcatcccggccggccggggacctcccagtctgcggccatgaacgcgagcagcgagggcgagagcttcgcgggctcggtgcaaattccaggtggcacaacggtgctggtggagctgactcccgacatccatatctgcggcatctgcaagcagcagtttaacaacctggatgcctttgtagctcacaagcaaagtggctgccagctgacaggcacatccgcagcagcccccagcacggtccagtttgtatcggaggaaacagtgcctgccacccagactcagaccaccaccagaaccatcacctcggagacccagacaatcacagtttcagctccagaatttgtttttgaacatggctatcaaacttacctgcccacggaaagtaatgaaaaccagacagccactgtcatctctctccctgccaagtcacgcaccaaaaagcccacaacaccacctgctcagaaaaggcttaactgttgctatccaggttgccaattcaagactgcttatggcatgaaggacatggagcggcatttaaaaattcacacgggagacaaaccccataagtgtgaagtctgtggcaagtgctttagccggaaagacaagctgaaaactcacatgcggtgccacacgggcgtgaagccctacaagtgtaagacgtgtgactacgccgctgccgacagcagcagcctcaacaagcacctgaggatccactcggacgagcggcccttcaaatgccagatctgcccctacgccagccgcaactccagccagctcactgtccacctgcgatcccacacgggggacgcccccttccagtgctggctctgtagcgccaagttcaaaatcagctcggacttgaaaaggcacatgcgggtgcactcgggggagaagcctttcaagtgcgagttctgcaatgtccgctgcaccatgaaggggaacctcaagtcgcacatccgtatcaagcacagcgggaataacttcaagtgtcctcattgcgacttcctgggtgacagcaaagccaccctccggaagcacagccgcgtgcaccagtcggagcatcctgagaagtgctcggaatgcagctactcctgctccagcaaggccgccctgcgcatccacgagcgtatccactgcaccgaccgccctttcaagtgcaactactgcagcttcgacaccaaacagcccagcaacctgagcaagcacatgaagaagttccatggggacatggttaagactgaggctctagagaggaaggacaccggcaggcagagcagccggcaggtggccaagctggatgccaagaagagtttccactgcgatatatgcgatgcctccttcatgcgggaggactcgctccgcagccacaagagacagcacagtgagtacagtgagagtaagaactcggacgtgaccgttctccagtttcagatcgaccccagcaagcagcccgccacgcccctcactgtgggacacctccaggtgcccctccagcccagccaagtgccccagttcagcgagggaagagtcaaaatcatcgttgggcatcaggtgccccaggcgaacaccatcgtccaggctgccgccgctgcagtgaacatcgtcccgcctgccttggtggcccagaacccagaggaactcccagggaacagccggctgcagatcctgcgccaggtcagtctgatcgccccccctcagtcctcgcggtgtccgagcgaggcgggcgcaatgacccagccggctgtcctgctgaccacccacgagcagacggacggagccactctgcaccagactctcatccccacggcctcaggtggcccccaggaaggctctggcaatcaaactttcattaccagttcgggtattacttgcactgactttgaaggcctaaacgccttgattcaggaggggacagcagaagtgacagtggtgagcgatggaggccagaacatcgcagtggccaccacagcgccaccggtcttctcctcctcttcccagcaagaactacccaagcagacctactccatcattcaaggggcagcccatccagctttgctctgtcccgccgactccattccagattagtgcttaaaaaaacaaaaggagtgggggaaaggaattgagaaaaagaaatcttaagtagaattctctaaaaggtttgctcttaatgttttctttgttttgttttgtttttgagacggagtctcgctctgtttcccaggctggagtgcagtggcgctatcttggctcactgcaacgtccgcctcccaggttcaagcgattctcatgcctcagccctccgagtagctgggaccacaggtgtacgacatcatgactggctaatttttgtatatttagtagagacggggtttcatcatgttgaactcctgacctcaagtgatctgcccacctcagcctcccaaagtgctgggattacaggtgtgagccaccatgcctggccgtggtttgctcttaatgtttttaaggatggttgtgaatccccctggccccataataaattgtaattttatactgcttactataatttttttaacactgtaacaactttgagaccacctctgaatcgtcgcattataactgttgtagaatcttaaatgttaccaagatgattccaatgaggggttggaattaaatgcattaagtagtgaattcatgtgtttgtttccaacttgattttccaactctaataaaggtttctgtccatcttattacatttgtgtagtaaatggtacttcccagcctctcttttgccccattctggaatactccccagagtttgggggtgttcatgttttatacatgtaagtctgttggcatgaaggaccattttctacataatatgacatggatacttgacccaaaaaaaaatgtttagtgctaatgagcagaaaatgaatggttccataataaattgatatctgattaaaatataaaaaaaaaaaaaaaaaaa

SEQ ID NO: 272 - DNA, 4170 bp, HOMO SAPIENS
ctcttcccttaggtgtttaagttccgcgcgcaggccaggctgcaacctgacggccagatccctcgctgtcctagtcgctgctccttggagtcatgttcccagccgccccttctccgcggaccccgggtaccgggtcccgaaggggcccgctggccggactcgggcccggctccacgccccggacggctagcaggaagggtctgcccctggggtctgcagtcagctccccagtgctcttctcgccggtcggccggcgtagctcgctaagctcgcggggaacaccaacacgaatgttcccacaccactccataactgagtctgtgaactatgatgtgaaaacgtttggatcttctcttcctgttaaagtcatggaagccctaacattggctgaagtcgatgaccagctgaccattaacatagatgaaggtggatgggcttgtctggtgtgcaaagagaagctcattatttggaagattgctctgtcacctattactaagttatccgtttgcaaagaacttcagctgccacctagtgatttccactggagtgccgacttagtggctctttcttactcttctccctcaggtgaagcacattctactcaggctgttgctgtcatggttgccaccagagaaggatctatccgctattggccaagccttgctggtgaagatacctacacagaggcttttgtagattcgggaggtgataagacttacagtttcctaacagcagtgcagggaggaagttttattttgtcttcatcaggaagccaactaattcggttgatacctgagagctcaggaaagattcatcagcatatcctgcctcaggggcaaggcatgctttcaggaattggtcgaaaagtttcttctctttttggaattttatctcctagtagtgatctcacactttcaagtgttctctgggatagagagagatcaagcttttatagcctgacgagttcaaacatcagtaaatgggaattagatgattcttcagaaaagcatgcatacagttgggatataaatagagccctgaaggaaaacattaccgatgctatttggggatctgaaagtaactatgaagctattaaagaaggagtcaacattcgatatttggacttgaagcaaaactgtgatgggctggtgattttggcagcagcatggcactcagcagacaatccatgtctcatctattactctctgataacaatagaagataatggttgccaaatgtcagatgcagttactgtagaagtcactcaatataatccaccttttcagtctgaagacctgattttgtgtcagttgacggtcccaaacttttcaaaccagactgcctatctgtataacgaaagtgctgtctatgtgtgctccacaggaactgggaaattttctcttccccaggagaaaattgtctttaatgcacaaggagatagtgttttaggtgctggtgcctgtggtggtgttcctatcattttttctagaaacagtggactggtgtctattacttcaagggaaaatgtgtctatattggcagaagacttggaagggtctttagcatcttcagttgctggaccaaacagtgagagtatgatttttgagaccactacaaagaatgaaactatagcccaggaagataaaatcaagttgctgaaagctgcctttctgcaatactgcagaaaagatttaggtcatgctcaaatggtggttgatgagctcttttcctctcactctgatttggattctgattctgaactagacagggcagttacccaaatcagtgtagacctgatggatgactacccagcatctgacccacggtgggctgagtctgtccctgaggaagcacctgggttcagcaatacgtcactgattatccttcaccagctagaagacaagatgaaagctcactcttttcttatggactttattcatcaagttggcttatttggacgtctaggcagttttccagttagagggacaccgatggccactcgactgttgctctgtgagcatgccgaaaagctgtcagccgccattgttctcaagaaccaccactcccggctttctgaccttgtcaacacagccatattgattgctttgaacaagagggagtatgaaatcccatccaacctgactcctgcagatgtctttttcagggaggtatcccaagtagataccatctgtgagtgcttactggagcatgaggagcaagtcttgagggatgcacctatggattccattgaatgggctgaagtggtgatcaatgtgaacaatattctcaaggatatgctgcaggctgctagtcattatcgccaaaatagaaactctttgtatagaagagaagaatcactagaaaaagaacctgaatatgttccatggacggcaacaagtggtcctggtggcatccgaacggtaataatacgccagcatgagattgtcctgaaggtggcttatccacaggcagacagcaacctccgaaacatcgtgaccgagcagctggtagccctgatcgattgcttcctggatggttatgtttctcagcttaagtctgtggataaatccagtaatcgggaaagatatgacaatctggagatggaatacctacagaaaagatcagatctcttatctcctcttctttcactaggccagtacctgtgggctgcttctctagcagagaaatactgtgactttgatatattggtacaaatgtgtgagcagactgacaaccagagccgactccagcgctacatgacccagtttgctgatcagaatttttcagactttctcttccgttggtatctggagaaaggaaagcgaggcaaattattatctcagcccatttctcagcatggacagttggcaaattttttgcaagctcatgaacatctcagctggttacatgaaattaatagccaagaattagaaaaggctcatgcaacacttctgggtttggcaaatatggaaactcgttactttgcaaagaagaaaacccttcttggcttgagtaaattggctgcattagcttcagacttttcagaggatatgctacaagaaaaaattgaagaaatggctgagcaggagcgctttctactgcatcaggagaccctacctgaacagctgctggcggagaaacagctaaatctcagtgcgatgccagtattgactgcaccacaactcattggtctatatatctgtgaagaaaatagaagagctaatgaatatgatttcaagaaagctttggacttgttggaatatattgatgaggaagaagatataaatataaatgatctaaaactggaaatcctttgcaaagctcttcagagagataactggtccagttctgatggcaaagatgatccaattgaagtatctaaagacagtatatttgtgaagatcttacagaaacttttaaaagatggcattcagctcagtgagtacttaccggaggtgaaagacctgctacaagcggatcagcttggaagcttaaagtccaatccttacttcgagtttgttttgaaagcaaattatgaatattatgttcagggacaaatataactttttctaaaaatggccattgtttatgaaatctgtataagtgtgtccttatacaaattttaggccataaacaagtgtaagtttgtacaatttcataacatgtatagctgagtttttatactttatatgtaggaagctaatataaaatagttatgtaactgtgattttggttttcagttatgtgacttgttttttccacctgaaatgtgtcagttgttgttcctgtactcggtgccctttctttttactctcacgtggtcccaggttctggagttcttgtcctggttctagctgctcacatgtacaaatcacttctaggcctcagtttctgcgactatgaaaattactagattgcactagcttgtctctaaaattgctgtgactccagatactttgcactgaagagaatctagggtgtttgatatctgtttcagttagggctaatgggaaatgtctagtaagataaatgtcaacttttgctgacttattatgagatgaaaaaccaaaggagagtgggcctaactcatgtgagcttgataactgatgaactcattgggagcattttaaacttttctacataaataataaatgagcactaatgaaagta

SEQ ID NO: 273 - DNA, 2719 bp, HOMO SAPIENS
aaaaaaaaaaaaaagcgcttccgcccggagagagctggccgggttgaggcgccggctttcccgggtcttctccagctgccaccgctttactgcaaaactgacgggcgcaaaaacatgagtgactccgcgggagggcgcgctggtctccggcgttaccccaagctcccagtgtgggtggtggaggatcatcaggaggttctaccctttatataccgggccataggctcaaagcatcttcctgccagtaatgtaagttttttacatttcgactcacatccagacctccttattcctgtgaatatgccagcagacaccgtgtttgataaggaaacactctttggagaattaagtattgaaaattggattatgcctgcagtttatgctggccatttttcacatgtaatatggtttcatcccacgtgggctcagcagatcagagagggcagacaccactttttagtaggcaaagacacttctaccacaacaatcagggttacaagtacagatcattatttcctaagtgatggtctgtatgtacctgaagaccagctagagaaccaaaaacctttacaattggatgtaattatggtaaaaccttataagctctgtaacaatcaagaagaaaacgatgcagtgtcttctgctaagaaaccaaagctagccctggaagattcggaaaacactgcctctactaactgtgactcttctccagaaggactggaaaaggacacagcaacacagagaagtgaccagacttgcctagaaccatcatgttcatgttcttctgaaaatcaggaatgccagactgctgccagcactggggaaattctggaaattttgaagaaagggaaggcatttgttttagatattgacttggattttttttcagtcaagaatcccttcaaagaaatgttcactcaggaagagtacaaaatcttacaagagctgtaccaatttaagaaacctggcaccaacctaacagaggaagatttggtagatattgttgatactcgaattcatcaattagaggatttagaagccactttcgctgatttgtgtgatggtgatgatgaagaaacggtacagagatgggcttcaaaccctggaatggaatcactagttccccttgtacagagtttgaaaaaacggatggaagtaccagactatgaaatggttcaccaggctggtttaacctgcgattattcagaacttcctcaccatatcagcacagaacaagaaatagagtgtcttattcaatctgtgcattatttgctgaaaaatttaccaaatcctactcttgtgacaattgcaaggtcaagtctggatgattactgtccttctgaccaagttgacactattcaagaaaaggtcctcaatatgctacgtgccctctatggaaatctagacctccaagtgtatgcagcagagtctcctccatcttgaaacaaacaaaacattaggctcctgttgtatcttggtttagtaacaggcccttaattaacttatttgtacatgagtcttccagagaacactgttttatattaactttcagttgaaatctttcagatattttgaatctctgaacaaccattgtcagttgtgaatgatggtaaattttttggcatcaagtctcataaccccaactgatagaactgttgcttatctgtcttccttaagtattttttagggttttgtttttttttttgtttgtttgtttgtttgtcttcacttttcccccaggtctgttgagctgtatgagattcattcatacttcatttattcattcaactaatatttgttgaacacttacatgtaccagacattattaagtgctgggtatatggtaatgaacagaatagacaaggcccctgcccttttaggggagacagatgagaagtaaattacgggttatgagaaatgttatgaaggaaaggacaacaacagacatgtcttagtacttagggtatcatggctttataggaaagtaacattctctatcttttttttttttttaattttataaaaatagagatggggtctcaccatgttacccaggctggtctcaaactcctgggcacaagcaatccacctgccttcgcctcccgaagtgctgggattacagatgtaagtcactaccccagccagaaactaacattctcaaaagctactaccaaaaaaaccccacaaatttgccaatccatgaaagtatcataggaagtctacctttccaaggaatttggcattgtggccctgctcttgccaaatgctctccagcattgttggtatcaaggtggtctggttgagtaaacttgaccaaacaaaaattaactgttttttgcttttctgtttttgttttgctgatcaaaaaagcccttcagggtctcttgtgcatccaggaggtcattgtagatatcaataatatagtgcctaagtgccactttattgccaagtctagattgatacttttttcagataaaccagctttttatgtaaagagtaagggaaaaagttaaatctttaattctgacctgccataaatacccaaagatataaactgtcttccaccgcccccctcataactaagacatccttcctgagtcactcttaatcatgaaacttgattttctcaattggccagtcttctgatctttagtatctctttagttcagtaatttttacctacctacttgatttattttcctttaaaaggtgaaatgac

SEQ ID NO: 274 - DNA, 1618 bp, HOMO SAPIENS
gcttcccgtccgctgtcctctgctgccagtcccctgccccgggcaaagcccatctggtccgccgagcaggccggagctattgggagtggcggatcctcccaccccagccggatctgggccatggccgagcctggagagggactgccagaggaggtgctggcactcatcttccgccacctgtccctgagagaccgtgctgccgccgccagggtctgcagggcctgggccgccgctgctacctgcagcgccgtgtggcacgacacaaaaatcagttgcgaatgtgagctggaaggcatgctgccaccttatctgtccgcctgcctcgaccacattcacaacctacggctggaatttgagccatcgaggaagccgagccgccgggcggccatcgagctgctgatggttctggcgggccgtgccccggggctgcgaggcctgcgcctggagtgccgcggagaaaaaccgctcttcgacgcgggccgcgacgtcctggaggctgtgcacgctgtatgcggggcggccagccagctacgccacctcgacctgcggcgcttgtccttcacactggacgacgcgctggtgctgcaggcggcgcgcagctgtcccgagctccacagcctttttctggacaacagtaccctagtgggcagcgtgggtcccggctcagtgctcgagctactggaggcctgcccgcgcctgcgcgctctcggcctgcacctagccagtttgtcgcacgccatcctcgaagcactggcggcgccagaccgagcgcctttcgcgctcttggctctgcggtgcgcgtgccccgaagatgcacgcgcgtccccgctgcccaacgaagcctgggtcgcgttgcgccgccgccaccctgggctggcagtggagctggagctggagcccgcgctgcccgctgagagcgtgacgcgcgtcctgcagccagccgtccccgtggctgcgctgcgcctcaacctctcaggcgacaccgtaggcccagtgcgcttcgcagcacaccactacgccgcaaccctgtgcgcgctcgaggtgcgcgcagccgcttcggccgagctgaacgccgcgctggaggagctggcggcgcgctgcgcggccctgcgcgaggtgcattgtttctgcgtggtgagccactcggtgctggacgccttccgcgcgcactgcccgcgcctgcgcacctataccctcaagctcacgcgcgagccgcatccctggaggcctacgctcgtggcgtgattgggcgacttctctcccccgtccccgtggacgtaagcgctctgagagggaacggggggggtgtccaggcgcgccccgagtgctagtgccttcttttgggattgttgccccccgggtctttaccgagttgggaactgtgatggcatcgggaccagtcctgggcgccctgagaccactcgctgctctcaccctctgcagacgccccacccgctcggtcctggacacactgcccccctctcttgcctccacccctctgcggactctgcagctccgcggccccggcgcagggagagggagggcacgggcgcgggccgggcctcaagggtgagtgtgaaataaacaaatcctgcagtgaaaaaaaaaaaaaaaaaaa

SEQ ID NO: 275 - DNA, 2757 bp, HOMO SAPIENS
ggttgtccacagtctcgtagctaccaagtgacaggccacgatttgatctcaggccagtgtgttaaactccaatttgcgtgctcctgtccctccccgcgcgtcggcggagctcggggccggactggacctgccgagggaggggcggacagtcctgacggtgcggggcggggctggcggctgcccaggcctggctgaggcgccgcggccgggtccctctccacctgccgggcggagcgcacgggccatgggctgagccccgctgagcccgccgggccggccatgggcgatcgcgagcgcaacaagaagcggctgctggagctgctgcgggcgccggacacaggcaacgcgcactgcgccgactgcggggcggcagatcccgactgggcctcttacaagctggggatcttcatctgtctcaactgctgcggcgtccaccgtaacttccctgacatcagcagagttaaatctgtgcgacttgacttctgggacgacagtattgtggagtttatgatccacaatggaaacctccgtgtgaaggccaagttcgaagccagagtcccagctttctactacatcccccaggccaacgactgcctggtcttaaaggaacaatggattcgagctaagtatgagagacgggaatttatggctgatggggaaaccatctcgctcccaggtaaccgagaaggattcctgtggaagcgaggaagggacaactcacagtttctgagaaggaagtttgtacttctggcaagagaaggcctcctgaagtacttcacaaaggaacagggtaaaagccccaaagctgtcatcagcattaaggacttgaatgccaccttccagacagagaagatagggcacccccatgggctgcagatcacctacaggagagatggccacaccaggaacctgtttgtgtatcatgaaagtgggaaggagatagtggactggttcaatgccctccgtgcagcccgtctgcagtacctaaaaatggcctttcctgaactcccagagtctgagctcgtgccattcctcaccaggaactacctcaaacaaggcttcatggaaaagactgggccaaagcagaaagaacctttcaagaaaaggtggttcgccctggattgccatgagcggaggctgctctattacaagaacccactggatgccttcgagcagggccaggtttttcttgggaacaaggagcagggatatgaagcctacgaagacctgcccaagggcatccgaggaaatcgctggaaagccggactcaccattgtcaccccagagcggagatttgtcctcacttgccccagtgagaaggaacagcaggaatggctggaaagtttgcggggtgtcctgtccagccccttgacgcccctcaaccggcttactgcatcaacagagagtggccgcagcagcaggtgacccattaactgaggaactggctgccactgaacacctggaactccttgtgggaagaagtttgcacctcggccctggctgcccaccatcagtgccccgcagtcagcagccattcctggcagtgaactctgccaggactgaagctgtggctttatccatcagctccctgggccttccccgcaacccacctcggggatctgaggatctggtgcatagatgaacatctatcccctcctcccccatacacacctaggcttgaaatgccctacaggcccagaactttctcacatctgaaatggaggcattgcaatgaaaaggcacccacagcatcatgcaagtggcatcttgtaaaaaaaaaaaaaaagtttaatctgaatctaaccatgaggaaataatcagacaaatccacattaggggcattctgctaaacatctgacccagactcttcaaaaatgaagagtgaaagataaagtagtcaatggccgggcgcagtgagattgcgccattgcattccagcctgggtgacagagcgagactccgtatcagaaagaaaaagaggaactgaatgaaatctcagatggctgaaatgttagagaaacagagcaccaagtcccctgctctgtgactcgttgttcctttcctctgtcttcaagcaccacgcagaaatacactggatgttctctctttgcttcaatggagacccaaggagctgggaggtctcttaagagactctctgattctccgtggctgggtgtgatggctcatgcccataatcccagccctttgggaagctgaggcaggaggattgagaccaggagttcgagaagagcctgggcaacatagtgagaccccatctctacaaagaaaaaaaaattagctggacatggtaatgaatgcctgtagtcccagctactccggacactgatgtgagaggatcacttgagccagggaggtcatggctacagtgacccctcattgcaccactttacttagcctgggtgacagagtgagaccctatctcaaaaaaaaaaaaaatctatgcattgtatgggactttcctttggatcccccaatcaaaggataagcaatgcgtaagcctgtgtccttcctgaagcttctcgactgcccagatagggaggtgagtcctctctatctcctctggctctggaagcaccttgaaaatgtgcattttcaaggacacttgctgggttgtgcattaagggccagtttacttgtctgcctctttgaccacctgtgaactctgttgggtgtactctgctaagttctggggatgaggaaattaataaaggtacagtcttgccttcaaaaaaaaaa

SEQ ID NO: 276 - DNA, 3330 bp, HOMO SAPIENS
atctttgaggcgcgcgcaccgcacccggtcccgactctgtggcttcctgggggcgggttcgccgtcggccccgcccccgcccaggtgtctccctttgggaagctgcccgccgagtctccgagatttgtccctggtggtcccgcggacccctcgtccctccgcagtctccggctggcagcgatggagggcgctggggagaacgccccggagtccagctcctctgcccctgggtccgaagagtctgccagggatccacaggtgccgcctccggaggaagaatcgggggactgcgcccggtccctggaggcggtccccaagaaactctgtgggtatttaagtaagttcggcggcaaagggcccatccggggctggaaatcccgctggttcttctacgacgaaaggaaatgtcagctgtattactcgcggaccgctcaggatgccaatcccttggacagcatcgacctctccagtgcagtgtttgactgtaaggcggacgctgaggaggggatcttcgaaatcaagactcccagccgggttattaccctgaaggccgccaccaagcaagcgatgctgtactggctgcagcagctgcagatgaagcgctgggaattccacaacagcccgccggcacctcctgccacccctgatgccgccctggctgggaatgggcccgtcctgcacctcgagctagggcaagaagaggcagagctggaggagttcctgtgccctgtgaaaacaccccctgggctagtgggcgtggcagctgccttgcagcccttccctgcccttcagaatatttccctcaagcacctggggactgaaatacagaacacaatgcacaacatccgtggcaacaagcaggcccagggaacaggccatgaacctccaggggaagattctccacagagtggggagcctcagagggaggagcagcccttggcctctgacgccagcaccccagggagagagccagaggattctccaaagcctgcacccaagccttctctgaccatcagtttcgctcagaaagccaagcgccagaacaacaccttcccattcttttctgaaggaatcacacggaaccgaactgcccaggagaaagtggcagccttggagcaacaggttctgatgctcaccaaggagttaaagtctcagaaggagctagtgaagatcctgcacaaggcactggaggccgcccagcaggagaagcgggcgtccagcgcatacctggcggcggctgaggacaaggaccggctggagctggtgcggcacaaagtgcggcagatcgcggagctgggccggcgggtggaggccctggagcaggagcgggagagcctggcgcacacagcgagcctgcgggagcagcaggtgcaggagctacagcagcacgtgcagctgcttatggacaagaaccacgccaagcagcaggtcatctgcaagctctctgagaaggtcacccaggacttcacgcacccccctgaccagtctcctttgcgccccgacgctgccaacagggacttcctgagccagcaggggaagatagagcacctgaaggatgacatggaagcttaccggacccagaactgcttcctcaactccgagatccaccaggtcacaaagatctggagaaaggtggctgagaaggagaaggcccttctgacgaagtgcgcctacctccaagccagaaactgccaggtggaaagcaagtacctggccggtctgagaaggctgcaggaggccctgggggacgaagccagcgagtgctcagagctgctgaggcagcttgtccaggaggcactgcagtgggaagctggggaggcctcatctgacagcatcgagctgagccccatcagtaagtatgatgagtacggcttcctgacggtgcccgactatgaggtggaagacctgaagctgctggccaagatccaggcattggagtcacgatcccaccacctgctgggcctcgaggctgtggatcggccgctgagggagcgctgggctgccctgggcgatcttgtgccctcagccgagctcaagcagctactgcgggcaggagtaccccgtgaacaccggcctcgtgtctggaggtggctggtccacctccgtgtccagcacctgcacactccaggctgctaccaggaactgctgagccggggccaggcccgcgagcaccctgctgcccgccagattgagctggacctgaaccggaccttccccaacaacaaacacttcacctgccccacctccagcttccccgacaagctccgccgggtgctgctggccttctcctggcagaaccccaccatcggctactgccagggcctgaacaggctggcggccattgccctgctggtcctagaggaggaggagagcgccttctggtgcctggtggccattgtggagaccatcatgcccgctgattactactgcaacacgctgacggcatcccaggtggaccagcgggtgctccaggacctgctctcggagaagctgcccaggctgatggcccatctggggcagcaccacgtggatctctccctcgtcaccttcaactggttcctcgtggtctttgcggacagtctcattagcaacatcctccttcgggtctgggatgccttcctgtacgaggggacgaagtacaacgagaaggagatcttgaggctacagaatggcctggaaatctaccagtacctgcgcttcttcaccaagaccatctccaacagccggaagctgatgaacatcgccttcaatgacatgaaccccttccgcatgaaacagctgcggcagctgcgcatggtccaccgggagcggctggaggctgagctgcgggagctggagcagcttaaggcagagtacctggagaggcgggcatcccggcgcagagctgtgtccgagggctgtgccagcgaggacgaggtggagggggaagcctgacttggccacctcccctccccacagccttcctcacccttggctggcagacccactggaggtcaggcacggaccagtggcccagccctgggtgtcccatcaccatgtgaccttggacatgtcccttcccctctctggccctcagtttccccactgggacattgtgtgctgcaaagccattggttgggctacttcttcataggcacttacttacccagggatgccaccctttcgtcacctcttccacagagcactttggcatgtaaacaagcaagagcactgcctctatagggtaacctggaacattctctaggttatatcaatataaaacaatgtaaatggtggaaatcattcataagctttggaacttaaacagttctcagttaaaaaaaaaaaaaa

SEQ ID NO: 277 - DNA, 653 bp, HOMO SAPIENS
gggtgagcaaaggggcgggtccctggctgctgtggcctcccctgaccccctccccccgctgctggggtcctcggccaagcccccttctcactggactgagacatgaggctgagctggttccgggtcctgacagtactgtccatctgcctgagcgccgtggccacggccacgggggccgagggcaaaaggaagctgcagatcggggtcaagaagcgggtggaccactgtcccatcaaatcgcgcaaaggggatgtcctgcacatgcactacacggggaagctggaagatgggacagagtttgacagcagcctgccccagaaccagccctttgtcttctcccttggcacaggccaggtcatcaagggctgggaccaggggctgctggggatgtgtgagggggaaaagcgcaagctggtgatcccatccgagctagggtatggagagcggggagctcccccaaagattccaggcggtgcaaccctggtgttcgaggtggagctgctcaaaatagagcgacgaactgagctgtaaccagactggggaggggcagggggagaggcccccatcagggaccagactgttccaaaaaaaaaacaaaaaacaaaaacaaacaaaaaaacacttaaaagcccaaggaaaaaaaaaaaaaaaaa

SEQ ID NO: 278 - DNA, 2029 bp, HOMO SAPIENS
ctcagtcatgtgaccggcaatggcggcgctgacgagagctgcatttggaagtgttgtggagacagccccgtagcccaatgcgaccagactcagggaaaacatcaggcccctccagctgagcccttgtgtgagccccgcccctccctaaatgccagacttgggagctgacagacagcactgcctgtgctgggtttaaaagtcctggtcagctgagtggaaatagaaggatttctgctgccatcatcttccatgggctttccaggtcacacgacctacaagtagggagcagggaaagaagagtgagcctgcatgccaattctaagctcttcaggatcaaatgtcgttcgtcctgtccagaatggcagcctgtggaggcacctgcaagaacaaagtgactgtgtccaagcccgtgtgggacttcctgagcaaagagaccccagcccggctggcccggcttcgggaggagcaccgtgtgtctatcctcatagatggcgagacttctgacatctatgttctccagctttccccacagggtcctcccccggcccctccaaatgggctctacctagcccggaaggctctcaaggggctgctaaaagaggcagagaaagagctgaagaaagctcagaggcagggggagctgatgggctgcctggctctggggggtggaggggagcaccctgagatgcaccgcgcaggcccaccccctctccgagcagccccacttctgcccccaggagctcgggggctcccccctcctcctccccccctgcccccacctcttcctcctcgccttcgggaggaggcagaagagcaggagagcacctgccccatctgtctgggggagatccagaatgccaagacattggagaagtgccggcattcattctgcgagggctgcatcacccgggctctgcaggtgaaaaaggcctgccccatgtgcggccgcttctatgggcagctggtgggcaaccagccccagaatgggcggatgctggtctctaaggacgccaccctcctactgcccagctatgagaagtacggcaccattgtcatccagtacgtcttcccgcccggtgtccagggggctgaacacccaaacccaggagttcggtatcctggcaccacacgggtggcctacctcccggactgccctgagggcaacaaggtgctgaccctgttccgcaaggcgtttgaccagcgtctcaccttcactatcggcacgtccatgaccacagggagaccgaatgtcatcacctggaacgacatccaccacaagaccagctgcacagggggaccccagctgtttgggtacccagaccccacctacctgacccgggtgcaagaggagctgagagcgaagggtatcacagatgactgaaggacatcgcctttgccaaggcccctgctgtctgcctctactaggacccagcagaagcctctttctcctctctgccccctgccccccacaccacacctgtaggggacctgtctgactgggaagggagttccgagagggagggggcaatcccttcccccatcccccactggccaagtgtttcaatgcagtgtgagccactcccttctggcagaggccgacctccaaggctctgttctcccctccccgtgtacatatactcccggtttccctgcccctccattgcccttggctttttctggtatgtgctgtgctccacgaccaagccgagaaaggacctagggtggggaagggagggtctcttgattcctaaccgcccccacatactgctccaccgctgaacttcgggtgccggggaggagaaattgggctgatgtgagctccccgtcacccgccatggagccggctgtgtgtgttcatcagatacagttctcccttaaccttgtcctttctctcctgtgtctcagtctccgtcagtctgtctttctccgctcttctctgacccctgtgaggaacctccttaccctgttctggaatcgctgccagactgtagcttttaatttaataaaaataaagtaaaatatgcaactc

SEQ ID NO: 279 - DNA, 1802 bp, HOMO SAPIENS
gggcactatgtgcttccggtctccaataccgcaggagggcggtcttccccggctcgccaactcggctgctctgggggattcgtgcgcggtaagaagctgcgcggtagcgcggtgaggtgaggttctcagccaccaaagctgcagggtctcgtcgttcgttccctctggcctggcggaacttgcgtgggaagctgggaggacagaaggcttagccgctgggtccctgagctggctggagcgcgggctgtctaggggcggcgacctcagctgttgggctccggctgctgggggctgtgcgtccagccgccctggaatccgcctgtgggtgggccgcttggctctcccacttcaccctcttgataacccagagcctcccccttcccacgtacgtaggggaaggataatctacttccttttgaacagcttcggtccccactatgacagtcgcataaacttcagcgaagagtgcgctggtaccactgatgaaattatgaccaggtgggcccgagttagtaccacatataacaagagacccttgcctgcaacatcatgggaggacatgaagaagggatcctttgagggaacaagccaaaacctaccaaagcgtaaacaacttgaagccaataggctatccctcaaaaatgatgcaccccaagcaaaacataaaaagaacaaaaagaaaaaagagtacttaaatgaagatgtgaatggattcatggaatacctaagacagaattcacagatggttcacaatgggcaaattatagcaacagacagtgaggaagtaagggaagaaattgcagttgctttaaagaaagacagtcgacgggaaggaagaagattaaaaagacaagcggcaaagaaaaatgcaatggtgtgtttccattgtagaaaacctggtcatggaattgcagattgccccgccgcccttgaaaatcaagacatgggcactgggatatgttacaggtgtgggtccacagagcacgaaataaccaagtgtaaggctaaagtagacccggctcttggcgaatttccttttgcaaaatgttttgtttgtggagaaatggggcacctgtctagatcttgtcctgataatcccaaaggactctatgctgatggtggcggttgcaaactttgtggctctgtggaacatttaaagaaagattgccctgaaagtcagaattcagagcgaatggtcacagttggtcgctgggcaaagggaatgagtgcagactatgaagaaattttggatgtacctaaaccgcaaaaacccaaaacaaaaatacctaaagttgttaatttttgataacagctagcactatcatgagttactacctcattgttactttctaaaccaggcccgcttcacgagttagagttgagctcccctgtagccaggactatgctgtagatatcagtatgatctgggtgtggccaaaaacaattttctttattctgtctatcaaatagtacttctaccactgtttggagaaaattgaagaaaagaataagatgattaaatgaattctctaaaagaacatattttaagagacagaacttagacataaccaagtagttgtatacctgattgtaacaatcatcttttataaaagcaaaattatgcataaatgtaaaacacccctaaacaaagggaacaaatgaatttttggttatattgttttcttggctcaaagtatcaatttattattataatagaaatttataagttgctagaaagtctatatttttaaagtacggaataaaaatatgttttctattaagcaatagaaaaaaaaaaaaaa

SEQ ID NO: 280 - DNA, 11373 bp, HOMO SAPIENS
gtgcgcggggcggcgccgcggaacatgacggcgccctgggtggccctcgccctcctctggggatcgctgtgcgccggctctgggcgtggggaggctgagacacgggagtgcatctactacaacgccaactgggagctggagcgcaccaaccagagcggcctggagcgctgcgaaggcgagcaggacaagcggctgcactgctacgcctcctggcgcaacagctctggcaccatcgagctcgtgaagaagggctgctggctagatgacttcaactgctacgataggcaggagtgtgtggccactgaggagaacccccaggtgtacttctgctgctgtgaaggcaacttctgcaacgaacgcttcactcatttgccagaggctgggggcccggaagtcacgtacgagccacccccgacagcccccaccctgctcacggtgctggcctactcactgctgcccatcgggggcctttccctcatcgtcctgctggccttttggatgtaccggcatcgcaagcccccctacggtcatgtggacatccatgaggaccctgggcctccaccaccatcccctctggtgggcctgaagccactgcagctgctggagatcaaggctcgggggcgctttggctgtgtctggaaggcccagctcatgaatgactttgtagctgtcaagatcttcccactccaggacaagcagtcgtggcagagtgaacgggagatcttcagcacacctggcatgaagcacgagaacctgctacagttcattgctgccgagaagcgaggctccaacctcgaagtagagctgtggctcatcacggccttccatgacaagggctccctcacggattacctcaaggggaacatcatcacatggaacgaactgtgtcatgtagcagagacgatgtcacgaggcctctcatacctgcatgaggatgtgccctggtgccgtggcgagggccacaagccgtctattgcccacagggactttaaaagtaagaatgtattgctgaagagcgacctcacagccgtgctggctgactttggcttggctgttcgatttgagccagggaaacctccaggggacacccacggacaggtaggcacgagacggtacatggctcctgaggtgctcgagggagccatcaacttccagagagatgccttcctgcgcattgacatgtatgccatggggttggtgctgtgggagcttgtgtctcgctgcaaggctgcagacggacccgtggatgagtacatgctgccctttgaggaagagattggccagcacccttcgttggaggagctgcaggaggtggtggtgcacaagaagatgaggcccaccattaaagatcactggttgaaacacccgggcctggcccagctttgtgtgaccatcgaggagtgctgggaccatgatgcagaggctcgcttgtccgcgggctgtgtggaggagcgggtgtccctgattcggaggtcggtcaacggcactacctcggactgtctcgtttccctggtgacctctgtcaccaatgtggacctgccccctaaagagtcaagcatctaagcccaggacatgagtgtctgtccagactcagtggatctgaagaaaaaaggaaaaaaagttgtgttttgttttggaaatcccataaaaccaacaaacacataaaatgcagctgctattttaccttgactttttattattattattataattattataattattattattaatattattttttggattggatcagtttttaccagcatattgctctactgtatcacaaacagcggacacgtcagcaggcgttgaggtgctgagctgtggatgcagaaccagcgccatgctgaagagcctcagccacctcctgtcctttgggattcgtttttcccgctttctctttgtttgtcgtctcagaatctgtgacacaaagaaacccatctcctgtcttaggaaacctaatgctgcaaactctacctagaggaacctttgaagactgttacataagaacataccttcctcagaagaggagtttcctctgccctctgcccttctcccctgcctccctccctcccctccttttattttgttttagtgagcttaagaaacagcagatgtgtctttcacggatctaacgggtgttgtcctgatcgagaaaaaaactgggatgagaatggtttggactggagttggaaggggaggacggtactgggggtagggtttggaacagagctacactggactcgggcacattcggagcagcatcctttagtatggaggctacttctcaggtaaccaggaattgaggggaaggaccttgtggaggccgagcattaacagcaagagcggggtttggagaaagtctgagattgggtgcagccctgacttacctgctggccctgaccagtttcttttcactaacttggccttgggcataggatgaaacattttttctgccctaattttaaaactaggtgagggtagaatcatcacaggttaggaatacattcttcataagacacgatgctgtaaatacccttaatggacgaaaagttgaaatacttttgtttcctcttggagcagttcagggaaatgcccacaggggattgtcctgcacagatagggcaagaggatttcctgggtggagtctgccaaggcctgcctcgctggggaccccagagtcctgcacctctggttccgccccaggtggtgacattactgtccccgttctgtggctcgtggacaagactttctccagaccccttaaagtggtacatattctaaaaaactgtttttctattatgccataaccttgctctagtcagtgaatgttcctaatgctgctgtttcaacatttgaattctttttaatttatgaaacatgctaaattttttttttcaaacaaaacacacacatccacatatacacatgcttcgctatgtggcttccaaggtttaaattttgaaaagtaaaagaattaaaacttcacgaccacagatcacctcaaaccagaaatacctcagaattttctacttatgtaaggtttattatatattttgttagttgtgttgtcttgtagtaagtatattttaatgtaagttggcttttgtgacaaggaagtttaaaagaaatagagaaaaagaaaaaagtttgcatcttctagggagtgctaccatttttgtttgataacgcccccttgtaaataattgtcatcaactgtaggttggctgtctgggccaagtctgggcatttatcagtcttgtttgtgaaggcttttccttctggtttctttagatcattttatttaaaaacagtgcatctcttcatcgtgagggtaggcaaggcgggggccgtggggagaggttgacctgggtgagaactgaagaggccgcctcctcttgggttgtttggagcttcacatgtaattcacatgtaacatgtaacttgatcggtcagtgttcagaatgacaagtaaccccgcttaaacttggtagaaggatggcccttagacctgaatggggtgattttacttgggatttaacttcttcagcaaattaacagcaacgttggaagagatctgtggcgcctctgtgaagcacaccgtgactcaggccagtcttttagtgcagcgtgtctgggagtgaagggttttgcccttgctggtcttggagtccacagtgtgaggggcactgcacatgcctgggcatctacctagtgtgctatgttcagtgtctggggcttactgccccggggtcctttcctctgggtgttggggcacagggtgctatgggaggcccatttgcttccctctcggagctcagtttttgcttcatgggtcaaaatgtgggctggccaagtggttacaggaacagggtttcggtaagctatgttgtctttttttttttttttttttttttttttaatggtttgattttgtgctgtggtattttttttcccttagaataatttttaatggcaaaacaggccttacagcagttgcttttctttaccatttatttctttaagaagctttaaaatatttattgaaaagtgccatatctaatttctttagctttcgcctcaggcagtgcaggcatctttacttttcatcctcagaagaaacaaacgactaacaaatgtagcaaatttactgcaggaatagttaggtcatgatactacctgaacactaaaccccagcctctttgtttggttttagttcctctgggtggtttttcttttgtgtgctggcttgattcttgtgagaagttttgacctggccaagggagggttgagccatggttctggtgtgggactttgcggtcaagacacagtacagacaggtcaggcctgcgtgccttttctctgggtggcctccccgttaggcccaccgtacgctcagccactatagtgtccctgtggggccttgccatcagattgtgtgtcaggagatggtacctttttggtgtggctggggaggagtgtggtccatgccagttctttgggcttcaggccactcttcccctcatgctgtggtgtaaagtgcacccatcaggtggtatatctggttctgatggcaagaagaaggtgggggatctccttatagggcatgggtctaggagcacagatgggccttttgccccgggtaaatgcttgtctgtttgctgtcatgtgttctttgaggagtgagccatctcgagccctgctttgaatttactgggtcatagagcctctgcctgtgctcttttccataatgacttcatgtgacatgcacttttggtgggctcagataattggtttctttttgtttttgacctcaggctctgtggcagactggggaaaatggggcctggcatcattttccctgtcaatgggaggggctgttccatgcagggtgggaggggaccaagttagcagagagtagccaaggatccttgcttcttcctttctagtgtgctgtcatccaagcaggctcctggctgtagggatgggccttggggaagaatcttctttgaaagcatctatgataactgagaagtcatccctagttggagaaatccagtaatgagcagaaggaggaagcaagtgaggacagaggccattgtattacagtgtcacgcagagggccctcaatgatggggcattggggaaggctgtagacatagtcatcagaacatcctggcctggcataagctgggttttctcctgggaccattggtcctcagcaggagttctttgcatgagttgctcaggggcaagggctgcaagtgggctgtgcttaggagaaagtgacacctggcagtgagggaagatggtgagcattattagcctttgttgtccagcatggccttcttgtcctgtctgctctggagaggagcctgtgggaccagtcctgcctggggagggcatacccacacgtgccagctgattctgactctgaatacatcatgtccggacttgggggtgtttctgcagaaaaaggaggttgtttttcagccttgaacatcttcaggaggatagagactcttgctcacatattcttagcaaagggaagggtctctcatctccaggccacagagatagttcttccattgccctaagaggctaggctaaccctcttgacataacttagacagcaaagcacttcatcctgtagttgggctctgtcacctttctcttcagttggccacattctcgtttcctccatcctgctatgctttgtgtgctcgggctgtgtgtggggtttttccctggtggaaggaagcccagctgtgtattgaatgtccttcatgtgttgtgtgtggctcagaaagcctgtcacttggcccctgtgctctgagccgtgagggtggggaggtggctgttccattaaagtgggagtattggatggccctcttgaaactagaattttgccttttttagtatgcagtataaagtttccagcatctattggtaacacaaagatttgctggtttttaaaataatacagtaagcataagtatgtaagtttttagaattggtactagaagttggacagctagttattctcgagaactttatttcactagaaaaatatactaattggaaagcagtttccaggagttaactcagtttaattttcagtctcagttattttagcctgttgagtttttgatggcacacctttggagagatggccacgcctgattcccatttcaggggcatcagaccatacctttttaagaagctccgtgaatctagtcatctacccttcatcctgggcgaacagccaaaaagagaaggggacaaggtgtctttttctccttctcactggggtgacatgaattcttttagttaatggctgtttgcaaattctaaactaatgaaatacttagcagctaacatgttcaatctagtaatgatgagtttaaatctcaattgacagtaatgttttagataaacaggcccagtaattcagttgatgaactgtatatcttctcagtctagatttgtaaatgtttaatgaattcagggttataagcatagttctttaagtaagattccagatagttgatttgcaaccagcagtctacctatgaatgtatcccaaacctttagaagattggaaaagatttttgaaataatgatttagttttgtaggaaaaacacccccttgaaaattaattcggttgacccagtaacattttttaaaacaattggtggctccaaaaggcctgccaacaaagaaaagtccaaattatctagtgggacattttgaatgttttatgtttattttgggtccactgtaaactttggttcaaaaaagaatttgaatttaaagaatttaccattatttaaattattaccaagtttttacattttcatgatggtattttccaggtatgaatgaaacatgactttttgattgtggtacttcctgtatcccctgtagtgccaaaaccagtgatactttatttgctcctatggcagctcatagaggtaaccgaagtgatttttcctcagtaattgaaacacatattctctaaatgccaatgtgtggtgatgggccctgcactgccttcatttctctagggcagtgtctttggattgtctagggcctaggtaattctgagaactactgtaaaccaaccacagggcactaaagcaatgtacacaccactctttgtgtgtatggaaggggttatataaacctgggctatgctggacatctacagaagagtattacattcacttgcaaagtttacatttttgagctcacagttatgaaaaatatgacccacaagtttttcaggcaggtgaggatgggtcttcttgcaaatgcatgagttctgtcttgagtcctgggaacttctctgttggttgagtgtgggctcattccctgactctcctaatcatgtttgcgtcagaatgttagcattgtaaataaaagaataggttgtataatagatacacaacacttgaaactttactttaaaaaaatcgatagttctacatatatatttagttatatcacttgacagatttcttctacacagtgtggagattgttttataccacagattatttttataaagttagtgaatttgaatgattttgtaatcagagctaatgagctttacctttcaagagaaacgtacactggagcatgagtggtgtggaacttttacttagtgtttatatggattcttgtgatacactggcagactggagtcaatttgcgggtcttttttggccaaaactccacttgtggttgtgtaggacagtgatattcagctcagcttcttgtggattgggaggagagagggcctgcaatgtgttttacattggtgcttcctcctgagatttctgttgaacaaagggttctgaggtcaaaaattagtttgtaagcctttgccataggacatagtcatgtgagagtgtttgggggaacagaaattgtataggggtgcctattggggtgggatgggactcgaataagattcaggtacaaaaactttgaaatgagaatctggtggtttgagtaatccaccagactgaattatctaagatcacattatccaggttggggggcagaattacccagttaagtaattgttcagaaaagtggggagggtggcatgtggatgcagtgatccaattaaatggagagctgccaggcacattttgtcctctctggtcagtgagaatggttgggttggctcgctgcttcaatctgtggaatcagccaggagcccagtgaggaagctcagaaccccagtaacagcagagcatctttcagatagctccagagttttcctgcttttctgaggaagctcagcatcactgccacaatacggaaagtggtcttcattttagcctatttatttttaggcagagagtggatggttatttgtgtgggacttttggtggcgatatataatgaataattaagttaatttctggtatgcataatggccagtcctgaggcccagctgaagacctgtcccccagaccctgcccgctggcttcaggctgctgcttctagacagaggtgcactggacgggatagttttatcaagagaatccctaatgtgtcattttaaaccagctgtgctttttattcattctggttgagcgtataggtttacactttaccctttttatacttggaataaatttagttccagcagatctagtagcactccagaaaccaaccccatctgttccccataaaaagaacattttctctgctctccagccacgtgtcttggaatgtaattctgttgtgcctttgtttttatcactctcttcgccccaaaagcaactgctgtaagcttttttctacttgtcttttctagtccccaacctctacctttttcctttttcccagccctaatttctggatgcacttctgtgatccaggtattttaagaaccagttacctcagacctcatgttgaacagtgtcgccatctgggtcctcttgatactgcagacttttaacgtacacatgcaggaaccctgctgagcgtgggcacttgttttaaagcaaaactcttcccaaggactgaagaaagggcttctggcaagctcgtcatggcattgtggtgggatgggtctagagtgtcatctgaatggtgcttcctgtgttcctctttgaattctgccattttcagtattcttgtgtgtctgaataggcaaagcgatttaattggctggtcttgcacgcaaattagttccaaagataagctctttgtaacacatttccagtcgctaatgctcaaatgtagaacattcctttaaatggcaggataaaaaacccactatccaccatagtgcattttgggaagatgtctgtagcatatgttgctgtgaaattaggccttgtgggatatggctgtttgtcattttgatgtattttaaataaatatatatattttttaaagagccttttttaccagttcaaaaagtttaattaaccagcagtcaccgcatctgaatttttgtctctggggcatagatggcagaccaagattaaaagtggtaactcagctatacgagcatgggctaccttcctgggctctcctgcagtcctgtagacctgctgttccgcagaccatgggacacaaggtcagtgtgttcccagtgagggtcccaagtcagtcatcttaagtgtttgttctctgccccattcagtggactgttgacttcagtccctgcaagtgctttagcccgagtggggttttctcagagcactgccacgagttaagtgtgtgtttagccaaataatttctccgtaagggaaaaatgcagtcacccaaattttaccaacaatgacagagatgagagtagaaaagattaggcaacatctgagttttaacttgaaaagtgtccaagtcatcatgaaaggccgactgggagcaagtgattattagagattcttcaggagacctcatctgaaaatgttaagactgccagtgagggaaggaattgttaaaatgccagcggcttttttttcctctttttttctgtaattctgtaaaaatgcagagaaagttgagtggtacttcagaattgagggagagggttaccgcagagtagaaatatatttctagatttcagttccacaccacaaatccacaacaatgccatttttcaactgtacaaaaatctgcttatgaactggacatgatcttaatggtagtgtcaaaggccaagtttttcacctgttaatatttttccacatttgtccttgaatctgaataactttatacagtactgtaaatttaacttacatcgagtttgttgtcaattcttatgaaaagagctttctgcatgtaacacatacggttaaagaacacagcaaaggacaaaatttgcaggaacagttttggaaccaacagaaaatgtcaccttttatttgccatcttatatatatctatcagttttaccagctacttctaaatttgtacattatttgtaagggaaagaaggaaaaccctaagacttgtctaacttagtggagaatgtgtgtgttgggcttaggatggatagctaagtcttattgagctgtgttacctaacttgtatataaaaattgtaattaaaagtttgggttcacctgtttctcacagtttaaaatgatgagtaattgcaaactctggaaatgtgactagtatatgatttaaggctgtagaagcaaggaagctctttcaagtgctaaaactaaagacttctagtttttggctcaaataagtactgtttgtataccaggatatgtgagatgtaaatgtagtaggtcacttttcacccttgtagctataaaataaaaattttgtagaacagaaatagcttgtactactgaattaacaaaagttatactaaagtatcatgtttaaaaaaaatatatatatatatacagagttaagcttgttgctgttaccctgtctggatttgaaaagtgtgctgatttatatatatatattacacacacacacacacacacacacacacacacacacacacacacacacacacacacacacacacacacacacatacacctaaaatggcctaaagcagacatccatgtaattacagttgcaaaatgaaaacattttggaaagaacattgtatcatagttcattcatttgcagtggatctttgttcctttttactgtggtaattttagaaatgagtgtcaagtttgaaattagatctgctaagttggggttttgctgcttgaactctgcactgggtcctcaaataaaccgatgtgaatgtagttttttccccctgtgtgaagaagcagttacaccccaacaataggaggaaaaatctagaactatttcaagttttatctttttgtatatgaaaataaaataataataaaacaa

SEQ ID NO: 281 - DNA, 5648 bp, HOMO SAPIENS
aagtggggccgaaggaaaacacggagagggagcccggccgggacaggaagaggctggggaccgcggcgaaggtggtgagtgctcttgggcgccttctcccaacgtccctgccagactcgcctccgggctgattctccagttggtttcctggactccagagtagctgtccggcctggccccggaggtgcaaagtaagaaaattgaagtcaaagaccatgggagatacagcaaaaccttatttcgtgaagcgcactaaagaccgggggactatggatgatgatgacttcagaaggggtcacccccaacaagattatttaataatagatgaccatgctaaaggccatggcagtaaaatggaaaagggccttcaaaaaaagaagataacaccagggaactatgggaatacccccagaaaaggaccatgtgctgtttccagcaatccatatgcatttaaaaacccaatctacagtcaacccgcttggatgaatgacagccacaaagatcagagtaagagatggctgtctgatgaacatactggtaattcagacaactggagagaattcaaacctggacctagaattcctgttataaaccgacaaagaaaagactcctttcaagaaaatgaagatggttataggtggcaagacacaagaggctgcagaactgtaagacgactgtttcataaagacctaacaagcctagaaaccacgtcagaaatggaagcaggaagtcctgaaaacaagaagcagaggtccagacctaggaagccacggaagactagaaatgaggaaaatgagcaggatggagacttggaaggccctgtgatcgatgagtctgtactttcaacgaaggagctgctaggcttacagcaggctgaggagagactgaagagagactgcattgacaggctaaaaaggcgaccacgaaactaccctacagcaaagtacacctgcagactctgtgatgttttaattgaatccattgcatttgcccataagcatatcaaggaaaagaggcacaagaaaaacattaaggagaagcaagaggaagagttgctcactacgttacccccaccaacaccctcccagataaatgcagttggcattgccattgacaaagtggtacaggaatttggcttacacaatgagaacttggaacagaggctggaaattaaacgtatcatggaaaatgtgttccaacacaagttaccagattgttccctaagattatatgggtcatcctgtagcagattgggtttcaaaaattcggatgtaaacattgacatccagtttccagccattatgtctcagccagatgtcctcttacttgttcaagaatgtttaaagaacagtgactcctttattgatgttgatgcagacttccatgctagggtgccagtggtggtgtgcagagaaaagcaaagtggtcttctgtgtaaagtgagcgcaggaaatgaaaatgcttgtctgacaacaaagcatttaactgcccttggaaaactagaaccaaagctggttcctttggtgattgcatttaggtactgggcaaagctttgcagtatagatcgccctgaagaaggaggtctgccaccttatgtgtttgccctgatggccattttctttcttcagcagaggaaagaaccccttttgcctgtatatctaggatcatggattgaaggattctcattaagcaaactagggaatttcaaccttcaagacattgaaaaagatgttgtgatctgggaacatactgacagtgctgcaggggacacaggcataacaaaagaagaggcaccaagagaaacgccgattaaaaggggacaggtgtcattaatattggatgtgaaacaccagccttcagtaccagttgggcagctctgggtggaattgctgcggttctatgctttagaatttaatttggctgatttagtgataagtattcgtgtcaaagaattggtatctcgggaattgaaggattggcccaaaaagcgcattgccattgaagatccctactctgttaaaagaaatgtggcaagaaccctaaatagtcaacctgtgtttgaatatatacttcattgtttaaggacaacatacaagtattttgctcttccacacaaaattacaaaatccagccttctaaagcctctgaatgcaattacatgtatttcagaacattctaaagaagtaataaatcatcatccagatgtacaaacaaaagatgataagctcaaaaactcagttttggcccaaggtcctggtgctaccagttcagctgcaaatacctgtaaggtacagccacttactcttaaagagactgctgaaagttttggaagcccaccaaaagaagaaatgggaaatgaacacatcagtgtccaccctgaaaactcagactgtatccaagcagatgttaactctgatgattacaagggtgataaagtataccatccagaaacaggaaggaaaaacgagaaagagaaagttggaaggaagggcaagcatctgttgactgttgatcagaaacgtggagagcatgttgtctgtggcagcacacgtaataatgagtcagagagcactttggatttagaaggcttccaaaatcccacagctaaagagtgtgagggacttgccactttagataacaaggctgatcttgatggagaaagtacagaaggtactgaggaactagaagactctctaaaccactttacccactcagtacagggccagacatcagaaatgattccctctgatgaagaggaggaggacgacgaagaagaggaggaggaagaagaacctaggctcaccattaaccaaagggaagatgaagatggcatggctaatgaagatgagttagacaacacctacactgggtcaggggatgaggacgccctatctgaagaggatgatgagttaggcgaagctgctaagtatgaagacgtgaaagaatgtggaaaacatgtagaaagagctctcctagtggaacttaataaaataagtctcaaggaagaaaatgtatgtgaagaaaaaaattcacctgtggatcagtctgattttttttatgaattcagtaaacttatcttcaccaaaggcaagtctcctacggtagtgtgcagcttatgcaaacgagagggtcatctaaagaaggactgtcctgaagacttcaaaagaatccagctagaacctctgccaccattaacacccaagtttttaaatatcttagatcaagtctgtatccagtgttataaggatttttctccaacaattatagaagatcaggctcgtgaacatattcggcaaaacctagaaagtttcataagacaggactttccaggaactaaattgagcctgtttggctcctccaaaaatggatttgggttcaaacagagtgaccttgacgtctgtatgacaattaatggacttgaaactgctgagggattggactgtgtcagaactattgaagaattagcaagagtcctcagaaaacattcaggtctgagaaacatcttacctattacaacagcaaaggtgccaattgtgaagttcttccatttgagaagtggtctggaagtagatatcagtttgtataacacattggcccttcataacacaaggcttttatctgcttattccgccattgatcccagagtgaagtatttgtgctataccatgaaagtatttacaaagatgtgtgatattggtgatgcatctagaggcagcttatcatcgtatgcatatactcttatggtgctatattttctccagcagaggaatccaccagtcattcctgtccttcaagagatatacaaaggtgaaaagaaacctgaaatatttgttgatggctggaatatttatttttttgatcaaatagatgaactgcctacctattggtcagaatgtggaaaaaatacagaatctgttgggcagttatggttgggccttcttcgtttctacacagaggaatttgattttaaagaacatgttattagcatcaggagaaaaagtctgcttacaacttttaagaaacagtggacctcaaaatacattgttattgaagatccctttgatttgaatcataatcttggagctggattatcaaggaaaatgacaaattttataatgaaggcttttatcaatggtagaagagtatttggtattcctgtcaagggatttccaaaggactacccctcaaaaatggaatacttttttgatccagatgtgttaactgaaggagagctggccccaaatgatagatgttgtcgaatttgtggaaaaatcggacacttcatgaaggactgtcctatgaggagaaaagtaagacggcggcgagatcaggaagatgccctgaaccaaagataccctgagaacaaggaaaaaagaagcaaagaggacaaagaaattcacaacaagtacacagaaagggaggtgtcaacaaaagaagataagcccatacagtgcacacctcagaaagccaagccaatgcgggcagctgctgacctggggagggagaagatcctcaggccaccagtagaaaaatggaagagacaggatgacaaagacttaagagaaaaacgttgttttatttgtggaagagaagggcacattaaaaaggaatgcccacagtttaaaggctcttcaggtagcctttccagtaaatatatgactcagggaaaagcctcagcgaagaggacccagcaggaatcatgagggaaggaaaatgcagcactctaaatggccactcaggcgttcctattcactcggaaaattaggttcatttcacaggacacagcagtgtagatcaggcttcaacttaacatttaagggaaatgtcagatttttttttaatttaatgaaattgttaatgaggaaaaatttttaatatagtcttatctaccacacatccccatagatttaaggattttaatagaaagacatgatgtatgtatttaagccacgttaaaagaaaaaatataactatggaccggtattcagtgaatacagtttcatggtttttaattctttcaaagcacattaaaaatggtgtgctgataaaccccaagtaaattaaccctttttccgtataaatccattttttgttttgaagaggggaaattatatttattgttgtttactgaatcctggtgtgaaagcatatcagatatgtatgaactgctactgctgtacttccgatttacggacatcattttattgctatttgtagacgtgataacatgaacatgagtacctatttatgtgggccttcagtggatgggcagtgccactcaggtctctggggtttccctctctaattttaagtaaattgacatataactactatgcttataaaaatgaagtaaggaaaacaagtagtcctgtttgccactaaaaacattttcaaaggaaaaataaaatgaaagtactttttactttttatgatactcagaaattaggatgaagaacttttaaaattgctgaagatcaaagaggttatctctgccagtcacaagtgtggctggtgtcattctgggtctgactggagccctcctggactgtttctttaatttcaaaagccctgcagacatagtacctggtcagaactatgcctcggtttatttatcattttgaaataaaatcagaatttcaacctgtaaa

SEQ ID NO: 282 - DNA, 2250 bp, HOMO SAPIENS
gaggccgcggcggggaaaatggcggacgggaaggcgggagacgagaagcctgaaaagtcgcagcgagctggagccgccggaggacctgaagaagaagcagaaaaacctgtgaaaactaagactgtttcttccagtaatggaggggaaagttccagtcgcagcgctgagaagcgatcagctgaagaagaagctgccgacctcccaacaaagcctacaaagatctccaagtttggatttgccataggtagtcagacgacaaagaaagcatcagccatatccatcaaacttggatcaagtaagcctaaagaaactgttccaactcttgctccaaaaactctttcagtagcagcagcttttaatgaagatgaagatagtgaaccagaggaaatgcctccagaagcaaagatgaggatgaagaatattggaagggatacaccaacatcagctggaccaaactccttcaataaaggaaagcatgggttttctgataaccagaagctgtgggagcgaaatataaaatctcatcttggaaatgtccatgaccaagacaattaaatgatgttttgaaattggggtgtggggtgggtgtaaagttaaaaggaacagtttccttttttaaagaatggtataagactatctttggagccgctttttttttctttttcatttttttaaaagattgagtggtacactaataaatgagagtttgaaattagaggtaatttatgttttatatacagatttcaagacatttgctaattttgtagtttcatgtgattagtttccaaaggttacagataataaagaaatcagaaatggtacctttttaagaattgcatatttttttagacacaactattagcacattaagagggaagcaaagttactgtctatttaaaactgcaagcagttaactctcttaactcccttattacctaaacttgtctggctcccaggaacagccttatagagagagggagtattgtattgggaagaaaatgttactgaactattgactgaaagtaaatttagataaaatacagcttttttccttatgggcatttgttttgtttcaagtcatcataaactaggtattgcattgctatccgtggatacagacgcttagctcttaaaagattttttttttatgtaaactgttgaatatttgaaatagtccacttcaccttaatgggtcttgtctatcttcattagtcttcaaagaaaaaccatttgctaccaaagtaaatcagtattttgaatgtgcttctcttgttttttgtttattagctagttcctgtaagcatttccaccagaacttgaggcaaatcgtaaggaagctgtttcttttaaaacacaaaccaccaccaaaaatttaaatgtacatattgcttaagtatttggctgtttttattttttaaaaggtataaacaccaaaaaaaaaattaacattgtatgaagatggaaaataagaagatgcactttctgtaactttgtctaaggatttaaattactaacttatgaactccaatttgaattgaacttaactatcggctttcttactggtaaaattatatggtttattttaaatgcgtacatattgaccaatggcctctgaaaaagcacattttagatactgaaattgaaggaaagaaaatgcatcttcaaacattttttggaatctcaccacatatactttgttagatttgtgtattgtagggtgtttgttttgtatttttgtattgtatatgaactttttttaaatgtgacagttaaacacatctttaaaagcatagtcacagacaaaagcatacagtataaaaatttccttgaaaactcctacaatattatatttggaggcagcttcagactgttttattggtggtagctgcttgctgaggtcttttagttggtaataactccagagaagcagcctgtgtatattcctaacactttgttcactagcatttaagtttagaataagcccaagtaagacaatggaaatgtatatagaactcttagttcttacatgatttaattatatcgatacatgaatttaacttactttaatgtaggcaaactatcaattttttgtccattttcctgtttgttaaaataacatacctctcctacgtattattttcttgacccaaatgaaatattaacctaaggtcaagctgggagagagaaatgactgagatgaatgtctttactaaagtaccaataaatttgtcaaactcaaaaaaaaaaaaa

SEQ ID NO: 283 - DNA, 2725 bp, HOMO SAPIENS
gtgcgcgctcccgtcgtggcgacggtggcggcgagcggcgtcagagcttgagggggggttgacggcttctggcgggtggcggtgttgaaggcgagagcttgcttggcccgtgtcgcttctgtcccaagaaccggacggagagtgagggcacgagggtcgctgtcgggggctgtcgtcttccacgtacacgtcgtcgtgaggagcgcagtccggactcttcccgcaacccctccggctccctttccgcacgcctcgaggcggcggcggccaccgagacagcagcgcaccttcccccatcccttccccttatcccccagcccaaaagggcccggtctgcgccccacccccgcccgtccgcccgctacgccgccgccatgtcggcgcaggcccagatgcgcgcgatgctggaccagttgatgggcacctcccgggacggagatacaactcgtcaacgaatcaaattcagtgatgacagagtatgcaagagtcaccttctcaactgttgtcctcatgatgtcctttctggaactagaatggatcttggagaatgtctgaaagtccatgacctggctttaagagcggattatgaaattgcatccaaagaacaagattttttctttgaacttgatgccatggatcatctgcagtcattcattgcagattgtgatcgtagaacagaagtggccaagaaaagattagcagaaactcaagaagagattagtgctgaagtagcagcaaaggcagaacgtgttcatgagttaaatgaagaaattggtaaattgttagccaaggtggaacaactaggagctgaagggaatgtggaggaatcccagaaagtaatggatgaagtagagaaagcacgggcaaagaaaagagaagcagaggaagtttatcggaattctatgccagcttccagttttcagcagcagaaacttcgagtctgtgaagtctgctctgcctatttaggacttcatgataatgacagacgactggctgatcattttgggggtaaactgcacctgggatttattgaaataagagagaagcttgaagaattaaagagagtcgtagctgagaagcaggagaaaagaaaccaggaacggctgaaacgaagagaagagagagagagagaagaaagggagaagctgaggaggtcccgatcacacagcaagaatccaaaaagatccaggtccagagagcatcgcagacatcgatctcgctccatgtcacgtgaacgcaagaggagaactcgatccaaatctcgggagaaacgccatcgccacaggtcccgctccagcagccgtagccgcagccgtagccaccagagaagtcggcacagttctagagataggagcagagaacgatccaagaggagatcctcaaaagaaagattcagagaccaagacttagcatcatgtgacagagacaggagttcaagagacagatcacctcgtgacagagatcggaaagataagaagcggtcctatgagagtgctaatggcagatcagaagacaggaggagctctgaagagcgcgaagcaggggagatctaactagctgtgtacatttcttcagtccttaagcttcctacggagttacgtactattgtttagttcacagctgttcagggtgacagtgagcagatccagacaccagatccagctaggctagatgtacagtatctaacttgatctgaactgaacctgttttccttgatgatgcctaaaactacatccatagtttctggtgaacctgtaatacagttctgaaagtacagttttatataataagatgctgatctctttattctttcaagtaagagtgctagtgaacaaattgtgttacttgccttgggattttttgaacgtttgtaaaatgctgtcttcctagtccaaacagctgcagctttgggcatttttctttttaattattcttcctctgactttgtatcccttaatacctacactctccaattgtaagagaaagggggcagggaagcaatatagcttccattctaaggctgtattcccgttatgaattactagctgattacagttcagagcattgatcctggaatgtgtgctggagaaatttaaaatactggggttttttgtttaatggtgcctatttagagttggaagttgaacagctgttgcattacatacttttgcttttttattgaaattttgaaatcaaacgtcttgatttttctgttctgttgaattgctatgttcaggatgttctagggggtgggggcagggactcttttcgtaataagcacttgttttattttgtgtgtgtggagtataaaggctacacccttattgtaaaaaaataataataataaaatgaaagaaacaatcaccaccaccattattaaactgtaacttgtctagtaaattgtcactagaactatttgctgtgggcatttcctctattctgttacgtcattaacagtgccttactgtgcaaggcaccaaaggacataaatacgtacttgcaaagattccagatgagctgttcatgtgggccccttgctgactatattccagccacttcagggttgtttgtaatgaccgttatagagaagggctcgacctgcagaagaaactggggtgtttttattctcattcaacaaacccaaataaaaacagtatatgtaaccaaaaaaaaaaaaaaaaaaaaaaaaaaaaaaaaaaaaaaaaaaaaaaaaaaaaaaaaaaaa

SEQ ID NO: 284 - DNA, 2332 bp, HOMO SAPIENS
ctcgggtcaaatgcgcgcctcggaccctagtgcgcgtgcgcgctggtggctccgcccctttggagctacttcctcatgctgcccgctcgcctaccgttcaggctgctgagccttttccttcgtggatccgctcccacggcagcgcgccatggcctccgggagccgctcctggagaggaggtgcgctgccgcctcctccttccagcactcatcgagtctgggacgcgagcttccttatgaccccgtggacacggagggctttggagaaggtggtgacatgcaggagcgttttctgttcccggagtacatcctggatccggagccgcaacccacccgcgaaaagcagctgcaggagctccagcaacagcaggaggaggaggagcgacagaggcagcagcggcgggaggagcggcgacagcaaaacctacgggccaggtcccgggagcacccggtcgtggggcacccggacccggcattgccgcccagcggcgtgaactgctcgggctgcggggcagagctgcactgccaggacgccggagtgcccggctacctgccccgagagaagttcctccgcacggcggaggcagacggcgggctggcacggaccgtgtgccagcgctgctggctgctgtcgcaccaccggcgcgctctacgcctgcaggtgagccgcgagcagtacctggagctggtgagcgccgcgttgcggcggcccggcccctccctggtgctctacatggtggacctgctggacctgcccgacgccctgctgcccgacttgcccgcgctggtgggccccaagcagctgatcgtgctgggaaacaaagtggacctcctgccccaggatgctcctggctaccggcagaggctgcgggagcgactgtgggaggactgtgcccgcgccgggctcctgctggcccctggccaccaagggccacagcgccccgtcaaggacgagccacaggacggggagaatccgaatccgccgaactggtcccgcacagtggtcagggacgtgcggctgatcagcgccaagaccggctatggagtggaagagttgatctctgcccttcagcgctcctggcgctaccgtggggacgtctacttagtgggcgccaccaacgccggcaaatccactctctttaacacgctcctggagtccgattactgcactgccaagggctccgaggccatcgacagagccaccatctccccttggccaggtactacattaaaccttctgaagtttcctatttgcaacccaactccttacagaatgtttaaaaggcatcaaagacttaaaaaagattcaactcaagctgaagaagatcttagtgagcaagaacaaaatcagcttaatgtcctcaaaaagcatggttatgtcgtaggaagagttggaaggacattcttgtattcagaagaacagaaggataacattccctttgagtttgatgctgattcacttgcctttgacatggaaaatgaccctgttatgggtacacacaaatccaccaaacaagtagaattgactgcacaagatgtgaaagatgcccactggttttatgacacccctggaattacaaaagaaaattgtattttaaatcttctaacagaaaaagaagtaaatattgttttgccaacacagtccattgttccaagaacttttgtgcttaaaccaggaatggttctgtttttgggtgctataggccgcatagatttcctgcagggaaatcagtcagcttggtttacagtcgtggcttccaacatcctccctgtgcatatcacctccttggacagggcagacgctctgtatcagaagcatgcaggtcatacgttactccagattccaatgggtggaaaagaacgaatggcaggatttcctcctcttgttgctgaagacattatgttaaaagaaggactgggggcatctgaagcagtggccgacatcaagttttcctctgcaggttgggtttcagtaacacctaattttaaggacagactgcatctccgaggctatacacctgaaggaacagttttgaccgtccggccccctctcttgccatatattgttaacatcaaaggacagcgcatcaagaaaagtgtggcctataaaaccaagaagcctccttcccttatgtacaacgtgaggaagaagaaaggaaagataaatgtatgagaccgaccttgttcactccagatattaactgtattgaacacaacaaaatacattgaatttgtattaaacatataacgcataaataaagctcccattcttaccctttttttcttttttctttttttttttttctgagactgagccctgctctgttgcccag

SEQ ID NO: 285 - DNA, 1184 bp, HOMO SAPIENS
gggcgcttcttccgggtggggccccgggccgaggcgatggcgccctgggcgctcctcagccctggggtcctggtgcggaccgggcacaccgtgctgacctggggaatcacgctggtgctcttcctgcacgataccgagctgcggcaatgggaggagcagggggagctgctcctgcccctcaccttcctgctcctggtgctgggctccctgctgctctacctcgctgtgtcactcatggaccctggctacgtgaatgtgcagccccagcctcaggaggagctcaaagaggagcagacagccatggttcctccagccatccctcttcggcgctgcagatactgcctggtgctgcagcccctgagggctcggcactgccgtgagtgccgccgttgcgtccgccgctacgaccaccactgcccctggatggagaactgtgtgggagagcgcaaccacccactctttgtggtctacctggcgctgcagctggtggtgcttctgtggggcctgtacctggcatggtcaggcctccggttcttccagccctggggtctgtggttgcggtccagcgggctcctgttcgccaccttcctgctgctgtccctcttctcgttggtggccagcctgctcctcgtctcgcacctctacctggtggccagcaacaccaccacctgggaattcatctcctcacaccgcatcgcctatctccgccagcgccccagcaaccccttcgaccgaggcctgacccgcaacctggcccacttcttctgtggatggccctcagggtcctgggagaccctctgggctgaggaggaggaagagggcagcagcccagctgtttagggttgctggaggccgggctaccgtcttgtgcctgaaaaccacggggcctgtccccagctggggtgagcgctcagagggcctggggccctcactcctgcccacgcctcccagaccccagaacggagcttcaagtcagacagatccctgccttggtgggcagttctgccttccaaggaagaaggggaagaaaaggacctgtgggtggctcaggcccaagcagaccccgggctccaccccagccccgcccaggctgctgccagtgcacacttttacaaatttaatataaagcaagtccagtcttaaaaagacaaaaaaaaaaaaaaaaaaaaaaaaaaaaaaaaaaa

SEQ ID NO: 286 - DNA, 3587 bp, HOMO SAPIENS
tgcgcagaacgctccagacgctgagaggcaggaggcactagggatcgtccgcaggattgggactgatacagaggccgccacggagcccgccggagccaccgttcctgctgctgccgccgctgcccgaatcggaaccgtcgggccgcagccgccggcaatgccgcgaaggaagaggaatgcaggcagtagttcagatggaaccgaagattccgatttttctacagatctcgagcacacagacagttcagaaagtgatggcacatcccgacgatctgctcgagtcacccgctcctcagccaggctaagccagagttctcaagattccagtcctgttcgaaatctgcagtcttttggcactgaggagcctgcttactctaccagaagagtgacccgtagtcagcagcagcctaccccagtgacaccgaaaaaataccctcttcggcagactcgttcatctggttcagaaactgagcaagtggttgatttttcagatagagaaactaaaaatacagctgatcatgatgagtcaccgcctcgaactccaactggaaatgcgccttcttctgagtctgacatagacatctccagccccaatgtatctcacgatgagagcattgccaaggacatgtccctgaaggactcaggcagtgatctctctcatcgccccaagcgccgtcgcttccatgaaagctacaacttcaatatgaagtgtcctacaccaggctgtaactctctaggacaccttacaggaaaacatgagagacatttctccatctcaggatgcccactgtatcataacctctcagctgacgaatgcaaggtgagagcacagagccgggataagcagatagaagaaaggatgctgtctcacaggcaagatgacaacaacaggcatgcaaccaggcaccaggcaccaacggagaggcagcttcgatataaggaaaaagtggctgaactcaggaagaaaagaaattctggactgagcaaagaacagaaagagaaatatatggaacacagacagacctatgggaacacacgggaacctcttttagaaaacctgacaagcgagtatgacttggatcttttccgaagagcacaagcccgggcttcagaggatttggagaagttaaggctgcaaggccaaatcacagagggaagcaacatgattaaaacaattgcttttggccgctatgagcttgatacctggtatcattctccatatcctgaagaatatgcacggctgggacgtctctatatgtgtgaattctgtttaaaatatatgaagagccaaacgatactccgccggcacatggccaaatgtgtgtggaaacacccacctggtgatgagatatatcgcaaaggttcaatctctgtgtttgaagtggatggcaagaaaaacaagatctactgccaaaacctgtgcctgttggccaaactttttctggaccacaagacattatattatgatgtggagcccttcctgttctatgttatgacagaggcggacaacactggctgtcacctgattggatatttttctaaggaaaagaattcattcctcaactacaacgtctcctgtatccttactatgcctcagtacatgagacagggctatggcaagatgcttattgatttcagttatttgctttccaaagtcgaagaaaaagttggctccccagaacgtccactctcagatctggggcttataagctatcgcagttactggaaagaagtacttctccgctacctgcataattttcaaggcaaagagatttctatcaaagaaatcagtcaggagacggctgtgaatcctgtggacattgtcagcactctgcaagcccttcagatgctcaaatactggaagggaaaacacctagttttaaagagacaggacctgattgatgagtggatagccaaagaggccaaaaggtccaactccaataaaaccatggatcccagctgcttaaaatggacccctcccaagggcacttaaagtgacctgtcattccgagccagcgaaccccagcagtaggaatccgtaccctagggatctgtctgtcatttctctgttgctcttgtgattggcaagtacagtatcctttgggaaggccatccccctcaggactgtcctggctccgacctttgtgtacactgcagacgctggttctgaggaactgttgtttcggcctcagtgaggttgcctggatgggatctgtattagacttgagtgcaggtctctcagcactgacccaaggagttctgttatggtactgtacctgtccagtcactggttctctcctcatgtcctctcgccccatgaggttgtgttgtgtcttctaagcgtggtactagtgcttgccacctggtcaccagacctccaaatatggctgccaccaccaggacctttccagttactccttatatgtgtgttctatggaggggcagggaaaaggtggcacttgtgagtgtgtgtggattggcagggggtccattcactttgggttccatcttgctttaaatttcttcattttgattaagagacctctttttgatctgtattgggctaaccagagccaaatacttttgaagagtttcccagggactagtcatggtaatagcatataattgatctgaatgagatggagagaagaatgaaggggtggtggttctgggtttgatttgagttcacctgtgggcagtgggcagtgggcagtgtcttggtgaaagggaacggatactactttttgcctcaccgtaaagtactcactagtaaatatttccttctctctttactcccactttttacgtttgcaggtgccaaagtaatgtccacttttccctttcatgctgcatattaactggttaattatactgcagaaaccttttcacctccactagtctgatacagtacatctgtacttccatataccttgcactgattttgtctgagtgccctgggagaagtagaaaatgattgaaagtgacttccgtatctcagcccatgactcagcaaggcagaatggccacccctgccaaagtttgcttctcttttcaacagtgcctcaccctccctctaggattaaagtgcttctgcccttccacgaactcctcctccatttcctttttgggatttgtcaccatccttctattctctggtcttctatttttggtgttgttcaagtgaaggaagagatgttccctctaatttctctctagcccattataacctgctatcttggggcaacttttgatgtatgacatgtcacccttcccaacttggtctcctccaacatgctgtcttcatgtggagccctcaccacaatccctgactccggtcatttgtgcctttctcttgtcatctctgtacactacttatattcactgtgggttgggggagctaattttaagcatgttcagtggcagctcccctccagtttcagtgtcactgttaaaatttatcaaaaagcaacttcactaggggttttcttaagggataaaggccttttacagaagctaaacccttccccacatgtggtagaatgtgctcttctatatctactcctcaataaagcatgttctctgctcaa

SEQ ID NO: 287 - DNA, 4488 bp, HOMO SAPIENS
aaaaggaaaacgaggcaccgagaagttaaggaacttgctcaaggtcacagagtttgaactcaggctacagatgctgcagcaactggagaaagtcctcatcgccccatatcacccaccaccgacccccagcaggacgtgacccccgccaggacggaggccggcagctggggggctggagcatgggacccagaacacggactcaggcttgcgcagcctcctggcttctaggcgggagcctagaaaggcgccagcccctttcgcgtgctgctgagactccaggggtggggttcactctcaggggcgcacaaaggcatgaaaaccttggcttcagcctctgagatgcggaactgaccgacctattgtcttgggacccaccagtgcgcttgggtgcaccagcccccttaacgttggtgccggctccctcccggctcctccccatcccagagggtcccctcgccccaggccctgagcctgcgtcctggggtcctgggccgcacgtgcctctggcagctcgaagaagctgtcggggcttgcaggagagcgtgcaaactgaaaccaaaacaggccgactcgaggaacatccgggtgggaccgcagactcaccggagcgcagcgcctgggccagggcctgggaccctgctccgccccgcgctcccctgcaccccttccccacgctgctcccctcttcctaagcggccccccctctcccgggcagcagaagaaggggtgggacccgggcgggctccgggagggggccctggaggaatggatggtggcggaagggcggagcaggggcggggcccgcggagactccacggggcgccccgggcgtgaggcacccactctgggagcacagagagctcaggtagcctgcctagatggcggcgcgcaccctgggccgcggcgtcgggaggctgctgggcagcctgcgagggctctcggggcagcccgcgcggccgccgtgcggggtgagcgcgccgcgcagggcggcctcgggaccctcgggcagcgctcccgcagttgcagcagcagcagcacagccaggctcgtatcccgcgctgagtgcacaggcagcccgggagccggccgccttctgggggcctctggcgcgggacactctcgtgtgggacaccccctaccacaccgtctgggactgcgacttcagcactggcaagatcggctggttcctgggaggccagttaaatgtctctgtcaactgcttggaccagcatgttcggaagtcccccgagagcgttgctttgatctgggagcgcgatgagcctggaacggaagtgaggatcacctacagggaactactggagaccacgtgccgcctggccaacacgctgaagaggcatggagtccaccgtggggaccgtgttgccatctacatgcccgtgtccccattggctgtggcagcaatgctggcctgtgccaggatcggagctgtccacacagtcatctttgctggcttcagtgcagagtccttggctgggaggatcaatgatgccaagtgcaaggtggttatcaccttcaaccaaggactccggggtgggcgcgtggtggagctgaagaaaatagtggatgaggctgtgaagcactgccccaccgtgcagcatgtcctggtggctcacaggacagacaacaaggtccacatgggggatctggacgtcccgctggagcaggaaatggccaaggaggaccctgtttgcgccccagagagcatgggcagtgaggacatgctcttcatgctgtacacctcagggagcaccggaatgcccaagggcatcgtccatacccaggcaggctacctgctctatgccgccctgactcacaagcttgtgtttgaccaccagccaggtgacatctttggctgtgtggccgacatcggttggattacaggacacagctacgtggtgtatgggcctctctgcaatggtgccaccagcgtcctttttgagagcaccccagtttatcccaatgctggtcggtactgggagacagtagagaggttgaagatcaatcagttctatggcgccccaacggctgtccggctgttgctgaaatacggtgatgcctgggtgaagaagtatgatcgctcctccctgcggaccctggggtcagtgggagagcccatcaactgtgaggcctgggagtggcttcacagggtggtgggggacagcaggtgcacgctggtggacacctggtggcagacagaaacaggtggcatctgcatcgcaccacggccctcggaagaaggggcggaaatcctccctgccatggcgatgaggcccttctttggcatcgtccccgtcctcatggatgagaagggcagcgtcgtggagggcagcaacgtctccggggccctgtgcatctcccaggcctggccgggcatggccaggaccatctatggcgaccaccagcgatttgtggacgcctacttcaaggcctacccaggctattacttcactggagacggggcttaccgaactgagggcggctattaccagatcacagggcggatggatgatgtcatcaacatcagtggccaccggctggggaccgcagagattgaggacgccatcgccgaccaccctgcagtaccagaaagtgctgtcattggctacccccacgacatcaaaggagaagctgcctttgccttcattgtggtgaaagatagtgcgggtgactcagatgtggtggtgcaggagctcaagtccatggtggccaccaagatcgccaaatatgctgtgcctgatgagatcctggtggtgaaacgtcttccaaaaaccaggtctgggaaggtcatgcggcggctcctgaggaagatcatcactagtgaggcccaggagctgggagacactaccaccttggaggaccccagcatcatcgcagagatcctgagtgtctaccagaagtgcaaggacaagcaggctgctgctaagtgagctggcaccttgtggggctcttgggatgggcgggcacccaagccctggcttgtccttcccagaaggtacccctgaggttggcgtcttcctacgtcccagaagcagcccccaccccacacatgacccacaccgccctcacgtgaagctgggctgagagccctttctcccatccattggaggtcccaggagtgtcacccatggagaggctatgcgacatggctagggctggttctgccatctgagtttggtttcctggaatgaaaaggcattgccatctccattcctctgccctcttgagccagcacaggaaggtgaggccctgggatagcgcgcctgctcagataacacagagctagttagctagtagcaaccgtgttttctccagatctgtctagatacaaaggtcagaaatcttatttttatacttttatattgtggaagaacagcatgcaacactcacatgtagtgtgtggatttacttgaacatgttctttttaacatgtagttatgaaaatctccttttttgcctctactggtgaggaaacatgaggatcagaggccacatttttaattattgttagtgtatttggaagtctgaattggagatgtttgtacctctgtctaaacagttcccttgagaacttccaagcctccggcatcttttcctggtgagtgtttctcctgtgcttggttgtgtataatggagctaactcctaagcggtggggtgaatgtggccgccttagttctgaagctactccagttatgttctgtttcttcaagctgtgatccagaaagatttttgtgcccccagatgcctcttgataggagaggcaacatactccaaatagttgggttcttcagggaagctattagaaactcaggtgacttgttagagcactaacttggtcagagccaaatcctggcaaacgctgcctgaccttcactctgtggttggggcggtgagaaccactgaggtccaatgatgagacttggaggtctggatccagtctctctttgttttaatgtgacttaggtgctgtcaacattagcaagataatggaaatcacgacgccagtgggtgcttacctccctgctaggcatgcaggggctggcggttggcaggggaaggaggcccagtgagccgggtcccttaggggagggagagtttgtcctctttgccccacagtctacccttcagggccttgtggcagtgccagtgttcggggggtgtctgggccactgagtacccactcggtcgtggttgtgctggcctcttgggtgagtgaacctgtgaagcccaggaggtggtgttggctgcagggtacacaaatactgagtggtggtcttttgttacaggcttagcaacaaagctgtgccctgggcatggggggctgtagtgtagctacagttgtgcgtttgtgaaatggcttagctttccatgttgctgagaggaacctggacatggtcccgggcatctgaatgatctgtaggggagggagttcaaataaagctttattttgttcaaaaaaaaaaaaaaaa

SEQ ID NO: 288 - DNA, 1497 bp, HOMO SAPIENS
tcactaatattttttcagaagatgacgcctcatttagaggataaaatattttaagttattttgatattcaagaggagcattattgggactgtttcagattttatcaccgtgatgtgttaaccctattgccaaatattctctaacatgtacccagtgaattcacacatcttgctgagcttctgaaaacaataggttctttccaaaggggatcaagtggccctgggagacccggcaacaaaccaaaaagaagggctgttgctgtgtctgtttacaacttttccagatgctggcagtacctgtggacttaaaagtgttttttagaggatcgccatggttattgatcactactttatgaactaaacagcattttccagaaaaagggggtttaacttgttacagaattggagaagtctttgcaaaggactgatttaagcccttctacccaacaccttcccctgtgtagatttgcatacagctaaatctaaaatattctgctaaagactattggatgtatggttgatgggatgaaacctttgattaaatttccttttggtggagacatcctgtggtaggtacagataatccaacaagagtccccatttctttgagcttaaaaaggacactgtcgagtaggtaggaggaaacctggcagagccccttatttttggcctaaaaggactgagcaccaagatgtcttttgaagttttaagctaagaggtttccagtgcaatacaatatatacaagtgaagtttttacctcagttttgcaatggactgcaaactatacttattacaccactacaccttctctcaagcctgccagggcctccatttatgtatgtggcttacagcttaaagtcagtagttggactactatatgaactgttactatcatgttttataccggtcgtaaatgcactccccaaactacaggaaagcggtatgtttattttttaaaccagcttttaattttcttagtattatttattgtagatgcaactgtttttattctgttggggggcttgggattattgcacttaactttgcagtttgagtgaactgtgttgaaaaagttaatgaaagcagttggtactcagacaaatagctgaaaactagtgaatgctaggttgttatcaagtttttatttgacattaaggttaaaaagatatatttattttctaaatattttggactttttttttgtttaactctttattagctgctaagtaaattgaagtgtatttaatgatgtgttaagttaacccgatttatggaagacagtaaagaacagccctctgtagtcagtaaagtttcaccttctaaagaatatattttgaattagttttatgaactctgttaaaattctgacccattacttgccaatttataaaagcctattttattacaaggcattgtctctggaaaaaaaaaattcccttaattcttaaatgtcattagatgtagaaagaaaaactaaatgttactaaggattattaa

SEQ ID NO: 289 - DNA, 9677 bp, HOMO SAPIENS
gcggccgccccgagacgccggccccgctgagtgatgagaacagacgtcaaactgccttatgaatattgatgcggaggctaggctgctttcgtagagaagcagaaggaagcaagatggctgccctttaggatttgttagaaaggagacccgactgcaactgctggattgctgcaaggctgagggacgagaacgaggctggcaaacattcagcagcacaccctctcaagattgtttacttgcctttgctcctgttgagttacaacgcttggaagcaggagatgggctcagcagcagccaataggacatgatccaggaagagcagtaagggactgagctgctgaattcaactagagggcagccttgtggatggccccgaagcaagcctgatggaacaggatagaaccaaccatgttgagggcaacagactaagtccattcctgataccatcacctcccatttgccagacagaacctctggctacaaagctccagaatggaagcccactgcctgagagagctcatccagaagtaaatggagacaccaagtggcactctttcaaaagttattatggaataccctgtatgaagggaagccagaatagtcgtgtgagtcctgactttacacaagaaagtagagggtattccaagtgtttgcaaaatggaggaataaaacgcacagttagtgaaccttctctctctgggctccttcagatcaagaaattgaaacaagaccaaaaggctaatggagaaagacgtaacttcggggtaagccaagaaagaaatccaggtgaaagcagtcaaccaaatgtctccgatttgagtgataagaaagaatctgtgagttctgtagcccaagaaaatgcagttaaagatttcaccagtttttcaacacataactgcagtgggcctgaaaatccagagcttcagattctgaatgagcaggaggggaaaagtgctaattaccatgacaagaacattgtattacttaaaaacaaggcagtgctaatgcctaatggtgctacagtttctgcctcttccgtggaacacacacatggtgaactcctggaaaaaacactgtctcaatattatccagattgtgtttccattgcggtgcagaaaaccacatctcacataaatgccattaacagtcaggctactaatgagttgtcctgtgagatcactcacccatcgcatacctcagggcagatcaattccgcacagacctctaactctgagctgcctccaaagccagctgcagtggtgagtgaggcctgtgatgctgatgatgctgataatgccagtaaactagctgcaatgctaaatacctgttcctttcagaaaccagaacaactacaacaacaaaaatcagtttttgagatatgcccatctcctgcagaaaataacatccagggaaccacaaagctagcgtctggtgaagaattctgttcaggttccagcagcaatttgcaagctcctggtggcagctctgaacggtatttaaaacaaaatgaaatgaatggtgcttacttcaagcaaagctcagtgttcactaaggattccttttctgccactaccacaccaccaccaccatcacaattgcttctttctccccctcctcctcttccacaggttcctcagcttccttcagaaggaaaaagcactctgaatggtggagttttagaagaacaccaccactaccccaaccaaagtaacacaacacttttaagggaagtgaaaatagagggtaaacctgaggcaccaccttcccagagtcctaatccatctacacatgtatgcagcccttctccgatgctttctgaaaggcctcagaataattgtgtgaacaggaatgacatacagactgcagggacaatgactgttccattgtgttctgagaaaacaagaccaatgtcagaacacctcaagcataacccaccaatttttggtagcagtggagagctacaggacaactgccagcagttgatgagaaacaaagagcaagagattctgaagggtcgagacaaggagcaaacacgagatcttgtgcccccaacacagcactatctgaaaccaggatggattgaattgaaggcccctcgttttcaccaagcggaatcccatctaaaacgtaatgaggcatcactgccatcaattcttcagtatcaacccaatctctccaatcaaatgacctccaaacaatacactggaaattccaacatgcctggggggctcccaaggcaagcttacacccagaaaacaacacagctggagcacaagtcacaaatgtaccaagttgaaatgaatcaagggcagtcccaaggtacagtggaccaacatctccagttccaaaaaccctcacaccaggtgcacttctccaaaacagaccatttaccaaaagctcatgtgcagtcactgtgtggcactagatttcattttcaacaaagagcagattcccaaactgaaaaacttatgtccccagtgttgaaacagcacttgaatcaacaggcttcagagactgagccattttcaaactcacaccttttgcaacataagcctcataaacaggcagcacaaacacaaccatcccagagttcacatctccctcaaaaccagcaacagcagcaaaaattacaaataaagaataaagaggaaatactccagacttttcctcacccccaaagcaacaatgatcagcaaagagaaggatcattctttggccagactaaagtggaagaatgttttcatggtgaaaatcagtattcaaaatcaagcgagttcgagactcataatgtccaaatgggactggaggaagtacagaatataaatcgtagaaattccccttatagtcagaccatgaaatcaagtgcatgcaaaatacaggtttcttgttcaaacaatacacacctagtttcagagaataaagaacagactacacatcctgaactttttgcaggaaacaagacccaaaacttgcatcacatgcaatattttccaaataatgtgatcccaaagcaagatcttcttcacaggtgctttcaagaacaggagcagaagtcacaacaagcttcagttctacagggatataaaaatagaaaccaagatatgtctggtcaacaagctgcgcaacttgctcagcaaaggtacttgatacataaccatgcaaatgtttttcctgtgcctgaccagggaggaagtcacactcagacccctccccagaaggacactcaaaagcatgctgctctaaggtggcatctcttacagaagcaagaacagcagcaaacacagcaaccccaaactgagtcttgccatagtcagatgcacaggccaattaaggtggaacctggatgcaagccacatgcctgtatgcacacagcaccaccagaaaacaaaacatggaaaaaggtaactaagcaagagaatccacctgcaagctgtgataatgtgcagcaaaagagcatcattgagaccatggagcagcatctgaagcagtttcacgccaagtcgttatttgaccataaggctcttactctcaaatcacagaagcaagtaaaagttgaaatgtcagggccagtcacagttttgactagacaaaccactgctgcagaacttgatagccacaccccagctttagagcagcaaacaacttcttcagaaaagacaccaaccaaaagaacagctgcttctgttctcaataattttatagagtcaccttccaaattactagatactcctataaaaaatttattggatacacctgtcaagactcaatatgatttcccatcttgcagatgtgtagagcaaattattgaaaaagatgaaggtcctttttatacccatctaggagcaggtcctaatgtggcagctattagagaaatcatggaagaaaggtttggacagaagggtaaagctattaggattgaaagagtcatctatactggtaaagaaggcaaaagttctcagggatgtcctattgctaagtgggtggttcgcagaagcagcagtgaagagaagctactgtgtttggtgcgggagcgagctggccacacctgtgaggctgcagtgattgtgattctcatcctggtgtgggaaggaatcccgctgtctctggctgacaaactctactcggagcttaccgagacgctgaggaaatacggcacgctcaccaatcgccggtgtgccttgaatgaagagagaacttgcgcctgtcaggggctggatccagaaacctgtggtgcctccttctcttttggttgttcatggagcatgtactacaatggatgtaagtttgccagaagcaagatcccaaggaagtttaagctgcttggggatgacccaaaagaggaagagaaactggagtctcatttgcaaaacctgtccactcttatggcaccaacatataagaaacttgcacctgatgcatataataatcagattgaatatgaacacagagcaccagagtgccgtctgggtctgaaggaaggccgtccattctcaggggtcactgcatgtttggacttctgtgctcatgcccacagagacttgcacaacatgcagaatggcagcacattggtatgcactctcactagagaagacaatcgagaatttggaggaaaacctgaggatgagcagcttcacgttctgcctttatacaaagtctctgacgtggatgagtttgggagtgtggaagctcaggaggagaaaaaacggagtggtgccattcaggtactgagttcttttcggcgaaaagtcaggatgttagcagagccagtcaagacttgccgacaaaggaaactagaagccaagaaagctgcagctgaaaagctttcctccctggagaacagctcaaataaaaatgaaaaggaaaagtcagccccatcacgtacaaaacaaactgaaaacgcaagccaggctaaacagttggcagaacttttgcgactttcaggaccagtcatgcagcagtcccagcagccccagcctctacagaagcagccaccacagccccagcagcagcagagaccccagcagcagcagccacatcaccctcagacagagtctgtcaactcttattctgcttctggatccaccaatccatacatgagacggcccaatccagttagtccttatccaaactcttcacacacttcagatatctatggaagcaccagccctatgaacttctattccacctcatctcaagctgcaggttcatatttgaattcttctaatcccatgaacccttaccctgggcttttgaatcagaatacccaatatccatcatatcaatgcaatggaaacctatcagtggacaactgctccccatatctgggttcctattctccccagtctcagccgatggatctgtataggtatccaagccaagaccctctgtctaagctcagtctaccacccatccatacactttaccagccaaggtttggaaatagccagagttttacatctaaatacttaggttatggaaaccaaaatatgcagggagatggtttcagcagttgtaccattagaccaaatgtacatcatgtagggaaattgcctccttatcccactcatgagatggatggccacttcatgggagccacctctagattaccacccaatctgagcaatccaaacatggactataaaaatggtgaacatcattcaccttctcacataatccataactacagtgcagctccgggcatgttcaacagctctcttcatgccctgcatctccaaaacaaggagaatgacatgctttcccacacagctaatgggttatcaaagatgcttccagctcttaaccatgatagaactgcttgtgtccaaggaggcttacacaaattaagtgatgctaatggtcaggaaaagcagccattggcactagtccagggtgtggcttctggtgcagaggacaacgatgaggtctggtcagacagcgagcagagctttctggatcctgacattgggggagtggccgtggctccaactcatgggtcaattctcattgagtgtgcaaagcgtgagctgcatgccacaacccctttaaagaatcccaataggaatcaccccaccaggatctccctcgtcttttaccagcataagagcatgaatgagccaaaacatggcttggctctttgggaagccaaaatggctgaaaaagcccgtgagaaagaggaagagtgtgaaaagtatggcccagactatgtgcctcagaaatcccatggcaaaaaagtgaaacgggagcctgctgagccacatgaaacttcagagcccacttacctgcgtttcatcaagtctcttgccgaaaggaccatgtccgtgaccacagactccacagtaactacatctccatatgccttcactcgggtcacagggccttacaacagatatatatgatatcacccccttttgttggttacctcacttgaaaagaccacaaccaacctgtcagtagtatagttctcatgacgtgggcagtggggaaaggtcacagtattcatgacaaatgtggtgggaaaaacctcagctcaccagcaacaaaagaggttatcttaccatagcacttaattttcactggctcccaagtggtcacagatggcatctaggaaaagaccaaagcattctatgcaaaaagaaggtggggaagaaagtgttccgcaatttacatttttaaacactggttctattattggacgagatgatatgtaaatgtgatcccccccccccgcttacaactctacacatctgtgaccacttttaataatatcaagtttgcatagtcatggaacacaaatcaaacaagtactgtagtattacagtgacaggaatcttaaaataccatctggtgctgaatatatgatgtactgaaatactggaattatggctttttgaaatgcagtttttactgtaatcttaacttttatttatcaaaatagctacaggaaacatgaatagcaggaaaacactgaatttgtttggatgttctaagaaatggtgctaagaaaatggtgtctttaatagctaaaaatttaatgcctttatatcatcaagatgctatcagtgtactccagtgcccttgaataataggggtaccttttcattcaagtttttatcataattacctattcttacacaagcttagtttttaaaatgtggacattttaaaggcctctggattttgctcatccagtgaagtccttgtaggacaataaacgtatatatgtacatatatacacaaacatgtatatgtgcacacacatgtatatgtataaatattttaaatggtgttttagaagcactttgtctacctaagctttgacaacttgaacaatgctaaggtactgagatgtttaaaaaacaagtttactttcattttagaatgcaaagttgatttttttaaggaaacaaagaaagcttttaaaatatttttgcttttagccatgcatctgctgatgagcaattgtgtccatttttaacacagccagttaaatccaccatggggcttactggattcaagggaatacgttagtccacaaaacatgttttctggtgctcatctcacatgctatactgtaaaacagttttatacaaaattgtatgacaagttcattgctcaaaaatgtacagttttaagaattttctattaactgcaggtaataattagctgcatgctgcagactcaacaaagctagttcactgaagcctatgctattttatggatcataggctcttcagagaactgaatggcagtctgcctttgtgttgataattatgtacattgtgacgttgtcatttcttagcttaagtgtcctctttaacaagaggattgagcagactgatgcctgcataagatgaataaacagggttagttccatgtgaatctgtcagttaaaaagaaacaaaaacaggcagctggtttgctgtggtggttttaaatcattaatttgtataaagaagtgaaagagttgtatagtaaattaaattgtaaacaaaacttttttaatgcaatgctttagtattttagtactgtaaaaaaattaaatatatacatatatatatatatatatatatatatatatatgagtttgaagcagaattcacatcatgatggtgctactcagcctgctacaaatatatcataatgtgagctaagaattcattaaatgtttgagtgatgttcctacttgtcatatacctcaacactagtttggcaataggatattgaactgagagtgaaagcattgtgtaccatcatttttttccaagtccttttttttattgttaaaaaaaaaagcataccttttttcaatacttgatttcttagcaagtataacttgaacttcaacctttttgttctaaaaattcagggatatttcagctcatgctctccctatgccaacatgtcacctgtgtttatgtaaaattgttgtaggttaataaatatattctttgtcagggatttaacccttttattttgaatcccttctattttacttgtacatgtgctgatgtaactaaaactaattttgtaaatctgttggctctttttattgtaaagaaaagcattttaaaagtttgaggaatcttttgactgtttcaagcaggaaaaaaaaattacatgaaaatagaatgcactgagttgataaagggaaaaattgtaaggcaggagtttggcaagtggctgttggccagagacttacttgtaactctctaaatgaagtttttttgatcctgtaatcactgaaggtacatactccatgtggacttcccttaaacaggcaaacacctacaggtatggtgtgcaacagattgtacaattacattttggcctaaatacatttttgcttactagtatttaaaataaattcttaatcagaggaggcctttgggttttattggtcaaatctttgtaagctggcttttgtctttttaaaaaatttcttgaatttgtggttgtgtccaatttgcaaacatttccaaaaatgtttgctttgcttacaaaccacatgattttaatgttttttgtataccataatatctagccccaaacatttgattactacatgtgcattggtgattttgatcatccattcttaatatttgatttctgtgtcacctactgtcatttgttaaactgctggccaacaagaacaggaagtatagtttggggggttggggagagtttacataaggaagagaagaaattgagtggcatattgtaaatatcagatctataattgtaaatataaaacctgcctcagttagaatgaatggaaagcagatctacaatttgctaatataggaatatcaggttgactatatagccatacttgaaaatgcttctgagtggtgtcaactttacttgaatgaatttttcatcttgattgacgcacagtgatgtacagttcacttctgaagctagtggttaacttgtgtaggaaacttttgcagtttgacactaagataacttctgtgtgcatttttctatgcttttttaaaaactagtttcatttcattttcatgagatgtttggtttataagatctgaggatggttataaatactgtaagtattgtaatgttatgaatgcaggttatttgaaagctgtttattattatatcattcctgataatgctatgtgagtgtttttaataaaatttatatttatttaatgcactct

SEQ ID NO: 290 - DNA, 1993 bp, HOMO SAPIENS
catccgtggacttggaggctggctcgggcccgcacctcccatccccagctgcccgcaacccccagtgactcgggatcccccggagagccctcccctctcggcaggagggggctgactcagggagaaatggcagtttagggcctagggggccacgtgaccctcccccaggaatgtggtgacgtcatcggaggcgtggtcgtccccaaaattagggaggaagaggaaaaaaaaaagccagaaaaagttttcttttctggagtcccaaacgaggtgcgggacggaagagggggtgaaggccagaggctcggggcttcaagaccgctgtctggagtccccctttccaggccatgtcggggcccacctggctgcccccgaagcagccggagcccgccagagcccctcaggggagggcgatcccccgcggcaccccggggccaccaccggcccacggagcagccccaccccagggtcaatttttgcccccttccatctgagcagtgttaccaggccccagggggaccggaggatcgggggccggcgtgggtggggtcccatggagtactccagcacacgcaggggctccctgcagacagggggggccttcgccctggaagcctggacgccgagatagacttgctgagcagcacgctggccgagctgaatgggggtcggggtcatgcgtcacggcgaccagaccgacaggcatatgagcccccgccacctcctgcctaccgcacgggctccctgaagccaaatccagcctcgccgctcccagcgtctccctatgggggccccactccagcctcttacactaccgccagcaccccggctggcccagccttccccgtgcaagtgaaggtggcacagccagtgaggggctgcggcccacccaggcggggagcctctcaggcctctgggcccctcccgggcccccactttcctctcccaggccgaggtgaagtctgggggcctggctataggagccagagagagccagggccaggggccaaagaggaagctgctggggtctctggccctgcaggaagaggaagaggaggcgagcacgggccccaggtgcccctgagccagcctccagaggatgagctggataggctgacgaagaagctggttcacgacatgaaccacccgcccagcggggagtactttggccagtgtggtggctgcggagaagatgtggttggggatggggctggggttgtggcccttgatcgcgtctttcacgtgggctgctttgtatgttctacatgccgggcccagcttcgcggccagcatttctacgccgtggagaggagggcatattgcgagggctgctacgtggccaccctggagaaatgtgccacgtgctcccagcccatcctggaccggatcctgcgggctatggggaaggcctaccaccctggctgcttcacctgcgtggtgtgtcaccgcggcctcgacggcatccccttcacagtggatgctacgagccagatccactgcattgaggactttcacaggaagtttgccccaagatgctcagtgtgcggtggggccataatgcctgagccaggtcaggaggagactgtgagaattgttgctctggatcgaagttttcacattggctgttacaagtgcgaggagtgtgggctgctgctctcctctgagggcgagtgtcagggctgctacccgctggatgggcacatcttgtgcaaggcctgcagcgcctggcgcatccaggagctctcagccaccgtcaccactgactgctgagtcttcctagaagtacctgctgggttctcagttccagttcccatcctttgattgatcactctccctgacatccacctgtatgactttgtcaccaaatgctgtcttctctttctccaatcaagaaataataatccctcgagtttacaaaacacttccaagtctgttgtctcatctgattctcccagtagcccattacaggcccagtcattgttactgcctgcat

SEQ ID NO: 291 - DNA, 4731 bp, HOMO SAPIENS
tgtatgtaggctgggagtgtctgctgatcacttggagtgctgtcccttggaacaggaggagtaagattgagcacccctgcagtggaccatgagtcggtaatgcccactgaggacctctgggagccatgtcagacgaatctgcctcagggagcgatccagacctggacccggacgtggagctggaggatgcggaagaggaggaggaggaggaggaggtggcagtggaggagtgtgacagggatgatgaagaagacctgctggatgacccatccctggaaggcatgtgtggcactgagcatgcccagttgggagaagatgggcagcagccgccgcggtgcacttcaactacctcatctcagtctgagccttcagagcagcttaggcgccaccaaggcaagaacctagcctccgaggaccccaaaaagaagagagctcagaagccctcccacatgagaagaaacatacgaaagctactccgggaggatcaattggagcctgttaccaaagcagcacagcaagaagagttggaaagaaggaagcgcctggagcagcagaggaaagattatgcagcccctattcctactgttccgctggagttcctccctgaggaaattgctttaagggcaagtgacggtccccaactgcctcctcgggtcttggcccaggaagtcatttgtttggacagtagcagtggcagtgaggatgaaaaaagcagtcgagatgaggtgattgaactgagctctggagaggaggacactctgcacattgtggacagcagtgaatctgtcagtgaagatgatgaggaagaagagaagggtggcacccatgtcaatgatgtcttaaaccagcgtgacgcccttgggcgggtccttgtcaacctaaaccaccctccagaggaggaaaatgtcttccttgccccacagttggcacgggctgtgaaacctcatcagattggcgggatccggttcctttacgataacctagtggagtctctggagaggtttaagaccagcagtggctttggctgtattctggcccacagcatgggtctggggaaaactttgcaagtgatctctttcatcgacgtcctcttccgccacacgccagccaaaacagtccttgccattgtgccggttaatactcttcagaattggctggcagagttcaacatgtggcttccacctcctgaagccctcccggctgacaacaagcctgaagaagtccagcctcggttctttaaagttcacatcttgaatgatgagcacaagacgatggcatctcgtgctaaagtgatggctgattgggtgtcagagggtggcgtgctgctgatggggtacgagatgtacagactcctcactctgaagaaatcatttgccacaggtagaccgaagaaaaccaagaagcgttctcacccagtcatcattgatctagatgaggaagatcggcagcaggagtttcggagagagtttgagaaggctttatgccgccctggccctgatgtagtaatctgtgatgagggacaccgcatcaaaaactgccaggccagcacctcacaggctctgaagaatatccgctctcgccgccgggtggtgctgactgggtaccctctgcaaaacaacctcattgagtactggtgcatggtggactttgtgcgcccagacttccttggcacccggcaggagttcagcaacatgtttgaacgccctatcctgaatgggcaatgtattgacagcacacctcaggacgtccgcctcatgcggtaccggagccatgtcctgcacagtcttctggagggctttgtgcagaggagaggccacactgtgctgaagattcatctccctgccaaggaagaaaatgtgatccttgtgcggctctccaagatccagcgagatttgtatacacagttcatggatcgcttccgggactgtggtagcagcggttggctggggctgaacccccttaaggcattctgtgtgtgttgcaagatctggaatcaccctgatgtgctgtatgaagcccttcagaaggagagcttggccaatgagcaggacctagacgtggaagaacttggctctgcagggaccagtgcccgctgtccaccacagggaacaaaaggcaagggagaggatagcaccttggcttcctcgatgggagaggcaaccaatagcaagttcctacagggcgttggcttcaaccctttccaggagcgaggcaacaacattgtcacatatgaatgggccaaggaccttctgactaattaccagactggagtcctagaaaactctcccaagatggtactgcttttccacctgattgaggaaagtgtgaagcttggggacaagatccttgtgtttagccagagtctttccaccttggctctcatcgaggaattccttggaaaacgagaagtaccctgtccacctggtaccgaggggcaaggagcacagaagtgggttcgaaacatcagctacttccggctagatggtagcacccctgcctttgagagggagcggcttattaatcagttcaatgatcccagcaacctcaccacctggctgttccttctctctacaagggccggatgcttgggtgtgaatctgattggtgccaaccgagtggtggtgtttgatgcttcctggaacccttgccatgatgcccaggcagtatgtcgggtataccgttatggccagaaaaagccctgttacatctatcgccttgtggctgattacactctagaaaagaagatctatgaccgtcagatttccaagcagggcatgtcagatcgggtggtggatgatctaaatccaatgctgaacttcacacggaaagaggtggaaaacctactgcactttgttgagaaggagccagctccccaagtttccttgaacgtaaaggggatcaaggagtcagtcctgcaactggcctgtctgaagtaccctcacctcatcaccaaggagcctttcgagcatgagtcattgctcttgaaccgaaaggatcacaagctaaccaaggctgagaaaaaagcagcaaagaaaagctatgaggaagacaaacgcacatcagtcccctatacccgcccatcgtatgcgcagtattaccctgccagcgatcagagcctgaccagcatccccgccttcagccagagaaactggcagccaactttgaagggtgatgaaaagcctgtggccagtgttcgtcctgtgcagtccacccccatccccatgatgccccggcatgtcccattgggaggaagtgtaagctctgcctccagcacaaatccatccatgaactttcccatcaactacttgcagcgtgcaggagtccttgtgcagaaggtggtcaccacgacagatattgttattcctggactcaacagctccacagatgtacaggcaagaattaatgctggtgagagcatccacatcatccgtgggacaaaagggacgtacatccgtaccagtgatggacggatctttgctgtccgggcaactggcaaaccaaaggttcctgaagatggtcggatggctgcctcaggttcccagggaccttcttgcgagtccacaagcaacggcagacacagtgcctcatcacccaaagcccccgaccctgaggggctggccaggcccgtctctcctgacagcccagagatcatcagtgagcttcagcagtatgcagatgtggctgctgcccgggaatcccgtcagagctccccaagcaccaatgccgccctgcctggccccccggcccaacttatggacagcagtgctgttcccgggacagctctcggaactgagcctcgactagggggtcattgcctcaatagttccctcttggtgactggccagccctgtggtgacaggcacccagtgctggacttaaggggccacaagcgaaagttggccacaccacctgctgcccaggagtcatcccgccggcggtccaggaagggtcatctgccagcccccgtgcagccgtatgaacacgggtatccagtctctggcgggtttgccatgccacccgtctccttaaaccataacctcaccacccccttcacctcccaggctggggagaactccctgtttatgggcagtaccccctcctactaccagctgtccaatttgctggcagatgcccgcctggtgtttccagtgactactgaccctctggtgccagcaggccccgtcagttcctcttccacggctacctcagtcactgccagcaacccctccttcatgctcaacccttctgtgccagggatactacccagctattcactcccattctcacagccactcctgtccgagccgaggatgtttgcgccttttccttcccctgtcttgcccagcaacctttcgcggggcatgtctatctatccaggctacatgtccccacatgcaggctacccagctggtggcctcctacggtcccaggtgcctccatttgactctcatgaggttgccgaggttgggttcagctccaatgatgatgaggataaagacgatgatgtgatagaggtcactgggaaatagctagggagcccctccccacctcacttggggcccccagcaggttgcccaccaagctggaaggcagtgatttagaccttttgagaataggacacttggcaggagggaaaaggaagaggacaaaggagggtggttggccaaagtggcagagctctgttgctgtttaacaaaagaggcaaaaaaaaaaaaaaaaaaaaaaaaaaaa

SEQ ID NO: 292 - DNA, 3715 bp, HOMO SAPIENS
gccgccgccgccgccgccgccgcgccgcggcttgagggcgggaggctgggggagggtagcggagccggcgccgccgccatgttgggtctgaagcggctgctgtaggcgccgacggagcgagcgggcgtgcggagcgggcgacagtggcgtgggatctgcctctctgcgagcagctgggagcggcggcggcggcgccatgagcgggggcaccccttacatcggcagcaagatcagcctcatctccaaggcggagatccgctacgagggcatcctctacaccatcgacaccgaaaactccaccgtagcccttgccaaagttcgatcctttggtacagaagacagaccgacagatcgtccaataccacctcgagatgaagtctttgaatacattatattccgtgggagtgacattaaagaccttactgtttgtgagccaccaaaaccacagtgttctttgcctcaagacccagctattgttcagtcctcactaggctcatcgacttcttcattccagtccatgggttcttatggacctttcggcaggatgcccacatacagtcagttcagtccgagttccttagttgggcagcagtttggtgctgttggtgttgctggaagctctttgacatcctttggaacagaaacatcaaacagtggtaccttaccccaaagtagtgcggttggttctgcctttacacaggatacaagatctctaaaaacacagttatctcaaggtcgctcaagccctcagttagaccctttgagaaaaagcccaaccatggaacaagcagtgcagaccgcctcagcccacttacctgctccagcagctgttgggagaaggagtcctgtatcaaccaggcctttgccatctgccagccaaaaggcaggagagaatcaggagcacaggcgagctgaagtacacaaagtttcaaggccagaaaatgagcaactcagaaatgataacaagagacaagtagctccaggtgctccttcagctccaaggagagggcgtgggggtcatcggggtggcaggggaagatttggtattcggcgagatgggccaatgaaatttgagaaagactttgactttgaaagtgcaaatgcacaattcaacaaggaagagattgacagagagtttcataataaacttaaattaaaagaagataaacttgagaaacaggagaagcctgtaaatggtgaagataaaggagactcaggagttgatacccaaaacagtgaaggaaatgccgatgaagaagatccacttggacctaattgctattatgacaaaactaaatccttctttgataatatttcttgtgatgacaatagagaacggagaccaacctgggctgaagaaagaagattaaatgctgaaacatttggaatcccacttcgtccaaaccgtggccgtgggggatacagaggcagaggaggtcttggtttccgtggtggcagagggcgtggtggtggcagaggtggtaccttcactgcccctcgaggatttcgcggtggattcagaggaggtcgtgggggccgggagtttgcggattttgaatataggaaagacaacaaagttgctgcatagtctacaaacaagtctctgaaaataggtgaatttctagctcttcatggtcctgaacattgatttcagtctttgcaaagaatgaagaagtgaattcgctgtacatttgtcaccagcactgggtttttgttttttgtttgtttttccgcttaatttcaaagataaaatgcagttacttttgggggtggaaggctcatcttaaaacatgagcattaaatatatttggaatagcagaaggttaagtaatttcttatgtatagttaaactaaagcagtacttcagtgggacttaacaagtattttttcatcactgaaaggttttttttttttatcactaaattgtatttggcaattgcaagttgcctgcagatagggccgtgatactgtgttttgagccacagaaggttgtgtgtgtgtgtgtgtgtgtgtgtgtgtgtgtgtgtgtatgtgtgtgtctttttcctcctttcttttggggaatcctgtaatatgaggtagcttatttcgtcaattaattagggtgctggatggtagagaattttgtcagtcaactatgtacacacagtaaatactgtttcttaggcaaaggtaacttttttatatagttgtaaaattccattatattccattgccaaagaaacattaagaactttgtatagctgtataaaaagcaactaattttttaaagaataaacattttaaagtcagcaaacatactgtgtccttgcagaagttgatgtgctgagcagcagccttatgggtgggtctttttttcttagttttccaggcttaacatttttgattttgttttttaatgtttggaacataaatgaagatttgatacattatttcattatctaaaaaggattaattattcatgctcattgtaagaacttcattttgtagcaaatggcatatcacaggatctgtccagataatcgatattttcagtatacaaatgtaaataatcacagatgagaatgtacttagctgtattttcaaataagtaatcttccccccttttgtaggactttaaaactaggcatcaatgaacctgtttttcctattatgcctggaatttagtcatgataccttgactcattccatcatatttcaagaggattcagagtgctagaaattattttggtagcctgtaacacacggcaacactggtccttgggcctatgatgacccacagatgactcagtatagagttcattgctaattataaattactagtgaatctttttgatattttaagctctagtgggaaaaatctggccacttttgtgtttttatgaaggccatggaataaaaggatccaaagatttaaatatttttatctaatattttgattgttttcttaactttctccttaaaacattcagtagtgataaagatatagaaactgcactgtaggagaattggaatatttaaggctggttgacattttttattttcattttatatcttttgtatagctctacaaggcagtgttttgtaatttggtttcattatgaagatccagtacttggcagccatagtttagacaatattgttcagtgctgtttgcttgcatgttaacaacaaaaccttttagaggacccacaaatcatgatattgaacacagttccgaggcattcagagcatcagagcaagtaccatggcaatacatgtgtagactgttggagatgtcccgggccaatttcaagaaagaaaactgtaaatactagttctacttgctctgaaattatgagtttatgcgttttcccagccctccgaatcactgactggggcgttttgtgccccagcaataactggcagcatggcatacctgcagtaccccttacaatattaaagcaaagtttttattctaaaacagaataaaactgttcaataaaaaatgctcgtcaaagttctttctctttaaatagtaacattctgtttcagtaggaacataatgaaaggaatcttttaaatggaagagcggaattataatgtttgtattccctgtaataactataaatcagttactttatttctaagattgagttattgttgcagatgtttagggaaagctaaaagccccttccttcccctcctgtgtgtaaataaaatacttctgagatca

SEQ ID NO: 293 - DNA, 5816 bp, HOMO SAPIENS
attataacagccaatgcagccgccatccacgcacaagcaaagaagcatgtcccatttaaatacacccacgcagccccagcgcccttagccgatcggggcgctcagcccacacgcaccgctgctcggggcttggagatccgcgcaggctgggctcccggacccggcggaccgacgcgcggaggatcgggatccggcgctgtggggctggggtgggcgggggaggctgggcccggggcctctggcgcgacacccgcatgaggacgcgagtgaaatagaccaaggtggaatttccaagggaaaagcttcggggtggttttggtccatttctccagcgaagaagtagacatggcgagcgactccccggctcgaagcctggatgaaatagatctctcggctctgagggaccccgcagggatctttgaattggtggaacttgttggaaatggaacatacgggcaagtttataagggtcgtcatgtcaaaacgggccagcttgcagccatcaaggttatggatgtcacaggggatgaagaggaagaaatcaaacaagaaattaacatgttgaagaaatattctcatcaccggaatattgctacatactatggtgcttttatcaaaaagaacccaccaggcatggatgaccaactttggttggtgatggagttttgtggtgctggctctgtcaccgacctgatcaagaacacaaaaggtaacacgttgaaagaggagtggattgcatacatctgcagggaaatcttacgggggctgagtcacctgcaccagcataaagtgattcatcgagatattaaagggcaaaatgtcttgctgactgaaaatgcagaagttaaactagtggactttggagtcagtgctcagcttgatcgaacagtgggcaggaggaatactttcattggaactccctactggatggcaccagaagttattgcctgtgatgaaaacccagatgccacatatgatttcaagagtgacttgtggtctttgggtatcaccgccattgaaatggcagaaggtgctccccctctctgtgacatgcaccccatgagagctctcttcctcatcccccggaacccagcgcctcggctgaagtctaagaagtggtcaaaaaaattccagtcatttattgagagctgcttggtaaagaatcacagccagcgaccagcaacagaacaattgatgaagcatccatttatacgagaccaacctaatgagcgacaggtccgcattcaactcaaggaccatattgatagaacaaagaagaagcgaggagaaaaagatgagacagagtatgagtacagtggaagtgaggaagaagaggaggagaatgactcaggagagcccagctccatcctgaatctgccaggggagtcgacgctgcggagggactttctgaggctgcagctggccaacaaggagcgttctgaggccctacggaggcagcagctggagcagcagcagcgggagaatgaggagcacaagcggcagctgctggccgagcgtcagaagcgcatcgaggagcagaaagagcagaggcggcggctggaggagcaacaaaggcgagagaaggagctgcggaagcagcaggagagggagcagcgccggcactatgaggagcagatgcgccgggaggaggagaggaggcgtgcggagcatgaacaggaatacatcaggcgacagttagaggaggagcagagacagttagagatcttgcagcagcagctactgcatgaacaagctctacttctggaatataagcgcaaacaattggaagaacagagacaagcagaaagactgcagaggcagctaaagcaagaaagagactacttagtttcccttcagcatcagcggcaggagcagaggcctgtggagaagaagccactgtaccattacaaagaaggaatgagtcctagtgagaagccagcatgggccaaggaggtagaagaacggtcaaggctcaaccggcaaagttcccctgccatgcctcacaaggttgccaacaggatatctgaccccaacctgcccccaaggtcggagtccttcagcattagtggagttcagcctgctcgaacaccccccatgctcagaccagtcgatccccagatcccacatctggtagctgtaaaatcccagggacctgccttgaccgcctcccagtcagtgcacgagcagcccacaaagggcctctctgggtttcaggaggctctgaacgtgacctcccaccgcgtggagatgccacgccagaactcagatcccacctcggaaaatcctcctctccccactcgcattgaaaagtttgaccgaagctcttggttacgacaggaagaagacattccaccaaaggtgcctcaaagaacaacttctatatccccagcattagccagaaagaattctcctgggaatggtagtgctctgggacccagactaggatctcaacccatcagagcaagcaaccctgatctccggagaactgagcccatcttggagagccccttgcagaggaccagcagtggcagttcctccagctccagcacccctagctcccagcccagctcccaaggaggctcccagcctggatcacaagcaggatccagtgaacgcaccagagttcgagccaacagtaagtcagaaggatcacctgtgctcccccatgagcctgccaaggtgaaaccagaagaatccagggacattacccggcccagtcgaccagctagctacaaaaaagctatagatgaggatctgacggcattagccaaagaactaagagaactccggattgaagaaacaaaccgcccaatgaagaaggtgactgattactcctcctccagtgaggagtcagaaagtagcgaggaagaggaggaagatggagagagcgagacccatgatgggacagtggctgtcagcgacatacccagactgataccaacaggagctccaggcagcaacgagcagtacaatgtgggaatggtggggacgcatgggctggagacctctcatgcggacagtttcagcggcagtatttcaagagaaggaaccttgatgattagagagacgtctggagagaagaagcgatctggccacagtgacagcaatggctttgctggccacatcaacctccctgacctggtgcagcagagccattctccagctggaaccccgactgagggactggggcgcgtctcaacccattcccaggagatggactctgggactgaatatggcatggggagcagcaccaaagcctccttcaccccctttgtggaccccagagtataccagacgtctcccactgatgaagatgaagaggatgaggaatcatcagccgcagctctgtttactagcgaacttcttaggcaagaacaggccaaactcaatgaagcaagaaagatttcggtggtaaatgtaaacccaaccaacattcggcctcatagcgacacaccagaaatcagaaaatacaagaaacgattcaactcagaaatactttgtgcagctctgtggggtgtaaaccttctggtggggactgaaaatggcctgatgcttttggaccgaagtgggcaaggcaaagtctataatctgatcaaccggaggcgatttcagcagatggatgtgctagagggactgaatgtccttgtgacaatttcaggaaagaagaataagctacgagtttactatctttcatggttaagaaacagaatactacataatgacccagaagtagaaaagaaacaaggctggatcactgttggggacttggaaggctgtatacattataaagttgttaaatatgaaaggatcaaatttttggtgattgccttaaagaatgctgtggaaatatatgcttgggctcctaaaccgtatcataaattcatggcatttaagtcttttgcagatctccagcacaagcctctgctagttgatctcacggtagaagaaggtcaaagattaaaggttatttttggttcacacactggtttccatgtaattgatgttgattcaggaaactcttatgatatctacataccatctcatattcagggcaatatcactcctcatgctattgtcatcttgcctaaaacagatggaatggaaatgcttgtttgctatgaggatgagggggtgtatgtaaacacctatggccggataactaaggatgtggtgctccaatggggagaaatgcccacgtctgtggcctacattcattccaatcagataatgggctggggcgagaaagctattgagatccggtcagtggaaacaggacatttggatggagtatttatgcataagcgagctcaaaggttaaagtttctatgtgaaagaaatgataaggtattttttgcatccgtgcgatctggaggaagtagccaagtgtttttcatgaccctcaacagaaattccatgatgaactggtaacagaagagcacttggcacttatcttcatggcgttatttctaatttaaaagaacataactcatgtggacttatgccagtctagaggcagaatcagaaggcttggttgaacatatcgctttccctttttcctctccctccgcccctcccagtacagtccatctttcaatgttgcagcctggttgagaaggagagaaaaaggtggcaggaatttccaggagatccccaagaatgctgccttgtctgtggacaaagatggaccatgtgcccttcggaattagggatagaaacaaatattgtgtgctcttaacgattaagctgtgttatggtgggttttcaggtttttaccttttttctttacccctttactctgcaagaatggggaaagaatgcatactgcgaaaatgagtcttttaaattctgtctgcctactagttttaagtatatggtatgttgtaaaatttccaatgatgagagacagcacaataaatgtaccttatctccttaggctgaaggccataactacatagtggagtaatttaagaactctcttgccttcaccaacccaaaaggttgctttttgatagcaactggctaatgaatttttaaaaagagaagaaaaatactagttttcccctcttttgggaaatagattttaaatggctaaactactagccttaaaactactagtctaataaaatcaactaccacttttgtgaatctgacaggccacatttttatatggccctttacagaatggagtgtgttgaacaggatactaacgccattgagttgagctggcctagcgatggagggacactctaacacaactttccctcagctattatgcaacagatcagggaaaaagatgggatgacagatggggtcagacagaaagagcttctgggaaacaagcttacatagtcttttttaaaatgcacaaagcctcccagctaagaggtcacttggtttgggcttcattaggactgagactttgttgagttctttctgggacttggagagtggatgatattcaggctctgaacattcccagcgctctcccgagggtgccactttctcaagatgaaaactgtgactgaaaaaattaataataaatgtttctgagctgcctgtgttctccctgtgtgggtgagagaagggactagactcctaagcctgcctcagatacaagaggcatcattggctccaattttagagaacttgaaagcaaggctttggacaaaattttgagaccctaatcactttaccttcctccaaattacccaacatacggtaaacaacatttgtgcagaagtatgtatgtatttagttcaggttgacttgtgtccttataaactcttactcaaatgatttgaactttaaaaaaaaaa

SEQ ID NO: 294 - DNA, 6020 bp, HOMO SAPIENS
gcctggagtagaacggcccgggcggaaccaacgggcagccgcgggggcgttgtgggccgcggcgcgtttccccggctccgtggctctggggcactgaggagcggcgcccgcggggcagcgaggagcccgatgcagggttctgcgcgtcatttccggtcccgcgggcgccccgtgaagcccacctggatccgccagcgctgtgccactccccagtgccgagctccgagctgtctccgcggcctcgcgcccggcccctccaccgcgcgcctctcaggccccgcccgccagcgtccctttgttgtgaaggcgccggggcctagcgctatgcctgcggcggagactgcatcaggctctcgcgtctgcttctgcgctttgcctgggagaggccctggtggcctcgttcctggcgcccggagtccctgctgcggccccacccccgggcggtcacggtgacccatgctgcccagcctggaggtaaaatcgttcgtggctgtggcttcagcatgtcgtcctcggtgaaaaccccagcactggaagagctggttcctggctccgaagagaagccgaaaggcaggtcgcctctcagctggggctctctgtttggtcaccgaagtgagaagattgtttttgccaagagcgacggcggcacagatgagaacgtactgaccgtcaccatcacggagaccacggtcatcgagtcagacttgggtgtgtggagctcgcgggcgctgctctacctcacgctgtggttcttcttcagcttctgcacgctcttcctcaacaagtacatcctgtccctgctgggaggcgagcccagcatgctaggtgcggtgcagatgctgtccaccacggttatcgggtgtgtgaaaaccctcgttccttgctgtttgtatcagcacaaggcccggctttcctacccacccaacttccttatgacgatgctgtttgtgggtctgatgaggtttgcaactgtggttttgggtttggtcagcctgaaaaatgtggcggtttcgtttgctgagacggtgaagagctccgcccccatcttcacggtgatcatgtctcggatgattctgggggagtacacagggctgctggtcaacctctccctcatcccagtcatgggcgggctggcgctgtgcacggccactgagatcagcttcaatgtcctggggttctcggccgcactgtccaccaacatcatggactgtttgcaaaatgttttttcaaaaaagctgctcagcggggacaaatacaggttctcggccccggagctgcagttctacaccagcgccgctgcggtggccatgctcgtcccggcccgggttttctttacggacgtcccagtgatcgggaggagtgggaagagcttcagctacaaccaggacgtggtgctgctgcttctgacagacggagtcctgttccaccttcagagcgtcacggcgtacgccctcatggggaaaatctccccggtgactttcagcgtcgccagcaccgtgaaacatgccttgtccatctggctcagcgtaatcgttttcggcaacaagatcaccagcttgtcggccgttggcacagccctggtgaccgttggggtcctgctctacaacaaagccaggcaacaccagcaggaggcgctgcagagcctggctgcagccactggccgggccccagacgacacagtggagccgctgcttccacaggaccccaggcagcatccctgagagcaggaagctgccagctgctgctgtcctcgtgacactgcatcccccagaaatgggcagggacgccctcctccatggccctgctggggtgcaggacatggggagctaagttggccattgcctgcggctttctcggtttgtcggtgaagaccagcagaaactcaaactggggattccaggtatcagcttcctggagtagagaccagaccagtagctgactgtgtccgccgagcccatccccgtgtagtgtgaaaacagcctctgaggctcccatgctgggggtgcccacttcctctctgggcgacaccccagggtccaccgggagccagaggtgggtccagtgccaacgagagccgctccctgccacagccaagagagccctcggcttcccacaccagccatcgaaggccctgaggccctggaccggcggcagactggccctgggcatgaggccacagagcagggccgaagggaggggacagagggccctggaaggaagggtctcctgctgccacggtgggcactcagaacttctccccacctgacccagggctgtgggcatcctcagactatcccagaggcatcgcaagcctcaagctgcagcattgcacggcactcaagggctatgaccacggaggccgttcagtcgcttctgtttagaggaaggccccctacctcttccacaccctgccctcctatcccttccacaccctgggctgcgtgagctccccgcaaccccagggcaccctgccctcctacctgtgggggtttccagccctgaggttgaggacaaacctctcgtgtttaacttgggaggagatgtgtacgttccttttcttttttggactctgagtatgaggcaggctgttctgaggtccccgtggggtgagcctgtctgtcctccctcagagcccaccgttcctatcatcatctagcacctgtccggttccccacgtgagccttgggcaggacgctgcagtgttgatggtttgggttacgtggcgtttacctgggcgccgtccttgctgaaaaaggaaacgtccacactgaatgtttctggggcgcgtggtgtgtgtcaggcgcccaccctgtcccactctccccaagggacagtagtacggcacactggggccaccagccagctcaactcatcctcctgtgtcacgcacccccgagggcgcaggaggcctgaggagtggctactggagccgtgtgttaggcagaggcttctgaccatgtctgagctctttacccccaatctcgcagctggcggattcccatgcccggtgcagcctgttgccagccagcctttgagacccagagctccagggcttgtcagaggcagcatggggcgccagtggtcctgagtctcatttccctgcctgctctttaggcctttggcacccatggtcacttcactggctttccatttggcttctcacctgggaaatacaaaaatagcccctcctgaagataaaatcattcagaaacagagcaataattctgactcattaacttctacctactcaaaaaagtctgccatgatgatggaccgaagtgaggctttttaacccacaagtaacctttttatttttttgagacagtcttgctctgtctgtcacccaggctggagtacagtggcatgatcttggctcactgcagcctcgacttcctgggctcaaatgatcctcccacctcagcctcccatgtggctggaaccacaggcacgtgccaccatgcctggctatttttttgttgagctgggctctcgctttgttgcccaggctggtcttgaactcctcggctcaagcaatccttcctactcagcctcctgtagtgtcgagaatataggcgtgggctactacacctgcttcagccgcttctataaaaccgctgacctgtgtgtggaggacaggccaggtgtgtgctcactgcgctgcgaagatgttttgtcacgtgactttccccggatttccatttctttttttctgctttcctcaaaaactaatagaagactgggtgtggtggctcacgcctctaatcgcagcactttgggaggcagcagctggcggatcacaaggccaggagttcgagaccagcctggccaacatgatgaaaccctgtctctaccaaaaatacaaaaattagctgggtgcgatggtgggtgcctgtaatcccagatactcaggaggctgaggcaggagaattgtttgaaccccggagatggaggttgcagtgagccaagatcgtgccattgcactccagcctgggcaacagggcaagattccgtctcaaaaacaaacactattagaaaatgccctggaggtggcggggagttgttgatttgtgaggacagattgaaagcaactcccagggtggtaatgtggctgccggcctctttgaagattgtggtctggcataaggagaggtgcaggcgcctggttctgagcaccttggaatttccagccgcacagcatctggtgccctcccctccaccctcacaaggagctgccatcctgtttggattttctgtttgtggaccagaaacaaacgtttttccaaaggattagcaaatagggtaatttcctgtgtaacgctgctctggggcctcttcctcatcctggcagaaggagcctggagcccatgaggcagccagcactgtgcccttgctcagtcgtgctgtcccctccctctccctcagtctcctctccatgcccaagtcggtttccagccgctggtcttcatggcattcccagcacagccgggcaccaagaggcaaaacccaaggcctggcttggccgtgttaacgattgtacagacattttttaaaataactttgtgtaatacttttctggaatagtaagttcttgttgaactgtcacaggtgagcttctaggaacacaccgggtgtggttacttccactgggtgtgtccatggtcgtggtctgtgcttttgtaaacgaacagaacacttgaaccacctcccgaattgggtcatcggcttctttacgttgatacttagagatttgcagctctctttcaaggaaacttcccctactgaaaggcataaaaaggttaaaaaagaaaatccgagagtcccaattccctgtataacagcattaaaataatctgcctgcctggaaagatgagaacactgttgcacaacccaaaatgtgtctttaatttgtgaaaaattaccatggtgagtcagacagtcattttaaacagctgaacagagactatcatcagcaaatagagctcagctttgtagctgcctttaaaatccttgtcccaaatccggtgagctctgcttgctgccgccgcgctcctgggtgatcactcagacgggtcagtgggaataacaggccaacaagacagctttttacatgtgtccaaaggatggcctttcgaaggcctggaagtatttcactgttggaagaagtaaacaagaatgacattccagatggaaatagaattctctctcttgcctttgaccaacatggtactaaggggtttcttctttcccaatgtatgtacgtgccctgctgggggccttactttatagaatgagagcatccgagcttccctaatgaatctggctagttctgtgtctggctgaggatacaggagtgggacatccactctcggatccctcagagcacagaaaccttcagctttgctgtctctgaagtatttcctccagtttccctgcgggcccctatgtttgagtttgatggctgctggatcctcactcaacgaaaactcggttggaaactgttccgcctggcagtccttttttgttgttttccatctcatttcccttccatctgaaagtggcattcagctgacttgctcatttagactgttcacggagtctgaatctgccaacgtggtgttggaggctccaccttgaaaagggccacagtcagggcaactttccccatacaggaaaacttgaaaattacatcaacagtctacgtcacagccaaattatatttcctttataccaaacaaaactatggagaactaaaagtacatcacacaaaacgtttatagtgttttgcatgtgacctatttcagtatttatataactagattagtgctttctagcaaacggttctgttaattagcgagtcactgttgattctgctgtggtggtaagttgataccgtgtaactaatcccgtggatgcctcctcgttatttttgtccaaacgaagcagccgtggtagtagctgtctatgattcttgctcagcaaagtaaaataaatgttaaatatggaaaaaaaaaaaaaaaaaa

SEQ ID NO: 295 - DNA, 1486 bp, HOMO SAPIENS
gtgggtggcagcaagcactcttctagcccagagaagtctgttccaggacgggctctttcaggagcagctaaagtcaggggccatgtccaccatgtgatagaaagacaagatggtcctgaaattctccgtgtccattctttggattcagttggcatgggtgagcacccagctgctggagcagagccctcagtttctaagcatccaagagggagaaaatctcactgtgtactgcaactcctcaagtgttttttccagcttacaatggtacagacaggagcctggggaaggtcctgtcctcctggtgacagtagttacgggtggagaagtgaagaagctgaagagactaacctttcagtttggtgatgcaagaaaggacagttctctccacatcactgcggcccagcctggtgatacaggcctctggtctaactttggaaatgagaaattaacctttgggactggaacaagactcaccatcatacccaatatccagaaccctgaccctgccgtgtaccagctgagagactctaaatccagtgacaagtctgtctgcctattcaccgattttgattctcaaacaaatgtgtcacaaagtaaggattctgatgtgtatatcacagacaaaactgtgctagacatgaggtctatggacttcaagagcaacagtgctgtggcctggagcaacaaatctgactttgcatgtgcaaacgccttcaacaacagcattattccagaagacaccttcttccccagcccagaaagttcctgtgatgtcaagctggtcgagaaaagctttgaaacagatacgaacctaaactttcaaaacctgtcagtgattgggttccgaatcctcctcctgaaagtggccgggtttaatctgctcatgacgctgcggctgtggtccagctgagatctgcaagattgtaagacagcctgtgctccctcgctccttcctctgcattgcccctcttctccctctccaaacagagggaactctcccacccccaaggaggtgaaagctgctaccacctctgtgcccccccggcaatgccaccaactggatcctacccgaatttatgattaagattgctgaagagctgccaaacactgctgccaccccctctgttcccttattgctgcttgtcactgcctgacattcacggcagaggcaaggctgctgcagcctcccctggctgtgcacattccctcctgctccccagagactgcctccgccatcccacagatgatggatcttcagtgggttctcttgggctctaggtcctgcagaatgttgtgaggggtttattttttttttaatagtgttcataaagaaatacatagtattcttcttctcaagacgtggggggaaattatctcattatcgaggccctgctatgctgtgtatctgggcgtgttgtatgtcctgctgccgatgccttcattaaaatgatttggaagagcaaaaaaaaaaaaaaaaaaaaaaaaa

SEQ ID NO: 296 - DNA, 1576 bp, HOMO SAPIENS
ggcgtccgatcgaggcgggcgttcacgggcggccagggttgagtcccgggtcggggccgggggattgccggcgcatcagggccgagggctggggctggcggggccgctcgctgcctctcgctcgcagcagcggcggcaggcgcgggcgagggccacggggagaggagacgcagccccgcgggtggcacgctcggccgggccccggcccgcgctcaacgggcgcgatgctcttctcgctccgggagctggtgcagtggctaggcttcgccaccttcgagatcttcgtgcacctgctggccctgttggtgttctctgtgctgctggcactgcgtgtggatggcctggtcccgggcctctcctggtggaacgtgttcgtgcctttcttcgccgctgacgggctcagcacctacttcaccaccatcgtgtccgtgcgcctcttccaggatggagagaagcggctggcggtgctccgccttttctgggtacttacggtcctgagtctcaagttcgtcttcgagatgctgttgtgccagaagctggcggagcagactcgggagctctggttcggcctcattacgtccccgctcttcattctcctgcagctgctcatgatccgcgcctgtcgggtcaactagcctcaccgaggtgccggagagggagcgctggacaactagaatgttgacctcgagccgaggccctacttgcagcgcaccggaggagaggctctctagtctgaaggcaccgccggcttgcgccgagctgagtgccgggtttccctattccaatcctgtttgaaatggtttcttcagcagggcttaaaagagcagccttcatcctgaaaatgtatttccttttgtttaatgctttgagtagataatcctgaattgaggtcatgaggaggccccccaggccagacagtcctgaacccctctgacacttggaaactgaatataagtaaaatgtccaggtggactctgagtatttcctgtggatcctgggaaagtactgttgcacaaaggctgcaaagctggactcaggaatgtcctccaaccagcagcgctgacctaagagctccctgtgccgtctatccagaccagacttcggtagatgcctttgttagatctatcacatgtaaacgagcttgtatctccttccctgtgccacgagagagattggctttttattccagtctaggcagagacagaagaatgttgaataagagcacgattagagtcctgtctggttatctgttgcccaagaaaagaactctgctgtccaggcactgcttggcttactatcccagcaaagactgcagttttgtggacttttgaccaccttgggctggcactcttagcacacctgagacagatttaagcctccctaagagactgaagagaggaacaggtgtcagatactcataggcactgagatctacaaatgggaagcttgtgagtggcccatctttgttggcctacgaactttggtttgatgccagtcaggtgccacatgagaacctttgctgagatgcaaataaagtaagagaatgttttcctgaaaaaaaaaaaaaaaaaaaaaa

SEQ ID NO: 297 - DNA, 8629 bp, HOMO SAPIENS
ttttgtcccggaaccccgcagccctccccacactctgggcgcggagcacaatgattggtcactcctattttcgctgagcttttcctcttatttcagttttcttcgagatcaaatctggtttgtagatgtgcttggggagaatgggggcctcttctccaagaagcccggagcctgtcgggccgccggcgcccggtctccccttctgctgcggaggatccctgctggcggttgtggtgctgcttgcgctgccggtggcctggggtcaatgcaatgccccagaatggcttccatttgccaggcctaccaacctaactgatgaatttgagtttcccattgggacatatctgaactatgaatgccgccctggttattccggaagaccgttttctatcatctgcctaaaaaactcagtctggactggtgctaaggacaggtgcagacgtaaatcatgtcgtaatcctccagatcctgtgaatggcatggtgcatgtgatcaaaggcatccagttcggatcccaaattaaatattcttgtactaaaggataccgactcattggttcctcgtctgccacatgcatcatctcaggtgatactgtcatttgggataatgaaacacctatttgtgacagaattccttgtgggctaccccccaccatcaccaatggagatttcattagcaccaacagagagaattttcactatggatcagtggtgacctaccgctgcaatcctggaagcggagggagaaaggtgtttgagcttgtgggtgagccctccatatactgcaccagcaatgacgatcaagtgggcatctggagcggccccgcccctcagtgcattatacctaacaaatgcacgcctccaaatgtggaaaatggaatattggtatctgacaacagaagcttattttccttaaatgaagttgtggagtttaggtgtcagcctggctttgtcatgaaaggaccccgccgtgtgaagtgccaggccctgaacaaatgggagccggagctaccaagctgctccagggtatgtcagccacctccagatgtcctgcatgctgagcgtacccaaagggacaaggacaacttttcacctgggcaggaagtgttctacagctgtgagcccggctacgacctcagaggggctgcgtctatgcgctgcacaccccagggagactggagccctgcagcccccacatgtgaagtgaaatcctgtgatgacttcatgggccaacttcttaatggccgtgtgctatttccagtaaatctccagcttggagcaaaagtggattttgtttgtgatgaaggatttcaattaaaaggcagctctgctagttactgtgtcttggctggaatggaaagcctttggaatagcagtgttccagtgtgtgaacaaatcttttgtccaagtcctccagttattcctaatgggagacacacaggaaaacctctggaagtctttccctttgggaaaacagtaaattacacatgcgacccccacccagacagagggacgagcttcgacctcattggagagagcaccatccgctgcacaagtgaccctcaagggaatggggtttggagcagccctgcccctcgctgtggaattctgggtcactgtcaagccccagatcattttctgtttgccaagttgaaaacccaaaccaatgcatctgactttcccattgggacatctttaaagtacgaatgccgtcctgagtactacgggaggccattctctatcacatgtctagataacctggtctggtcaagtcccaaagatgtctgtaaacgtaaatcatgtaaaactcctccagatccagtgaatggcatggtgcatgtgatcacagacatccaggttggatccagaatcaactattcttgtactacagggcaccgactcattggtcactcatctgctgaatgtatcctctcgggcaatgctgcccattggagcacgaagccgccaatttgtcaacgaattccttgtgggctaccccccaccatcgccaatggagatttcattagcaccaacagagagaattttcactatggatcagtggtgacctaccgctgcaatcctggaagcggagggagaaaggtgtttgagcttgtgggtgagccctccatatactgcaccagcaatgacgatcaagtgggcatctggagcggcccggcccctcagtgcattatacctaacaaatgcacgcctccaaatgtggaaaatggaatattggtatctgacaacagaagcttattttccttaaatgaagttgtggagtttaggtgtcagcctggctttgtcatgaaaggaccccgccgtgtgaagtgccaggccctgaacaaatgggagccggagctaccaagctgctccagggtatgtcagccacctccagatgtcctgcatgctgagcgtacccaaagggacaaggacaacttttcacccgggcaggaagtgttctacagctgtgagcccggctatgacctcagaggggctgcgtctatgcgctgcacaccccagggagactggagccctgcagcccccacatgtgaagtgaaatcctgtgatgacttcatgggccaacttcttaatggccgtgtgctatttccagtaaatctccagcttggagcaaaagtggattttgtttgtgatgaaggatttcaattaaaaggcagctctgctagttattgtgtcttggctggaatggaaagcctttggaatagcagtgttccagtgtgtgaacaaatcttttgtccaagtcctccagttattcctaatgggagacacacaggaaaacctctggaagtctttccctttggaaaagcagtaaattacacatgcgacccccacccagacagagggacgagcttcgacctcattggagagagcaccatccgctgcacaagtgaccctcaagggaatggggtttggagcagccctgcccctcgctgtggaattctgggtcactgtcaagccccagatcattttctgtttgccaagttgaaaacccaaaccaatgcatctgactttcccattgggacatctttaaagtacgaatgccgtcctgagtactacgggaggccattctctatcacatgtctagataacctggtctggtcaagtcccaaagatgtctgtaaacgtaaatcatgtaaaactcctccagatccagtgaatggcatggtgcatgtgatcacagacatccaggttggatccagaatcaactattcttgtactacagggcaccgactcattggtcactcatctgctgaatgtatcctctcaggcaatactgcccattggagcacgaagccgccaatttgtcaacgaattccttgtgggctacccccaaccatcgccaatggagatttcattagcaccaacagagagaattttcactatggatcagtggtgacctaccgctgcaatcttggaagcagagggagaaaggtgtttgagcttgtgggtgagccctccatatactgcaccagcaatgacgatcaagtgggcatctggagcggccccgcccctcagtgcattatacctaacaaatgcacgcctccaaatgtggaaaatggaatattggtatctgacaacagaagcttattttccttaaatgaagttgtggagtttaggtgtcagcctggctttgtcatgaaaggaccccgccgtgtgaagtgccaggccctgaacaaatgggagccagagttaccaagctgctccagggtgtgtcagccgcctccagaaatcctgcatggtgagcataccccaagccatcaggacaacttttcacctgggcaggaagtgttctacagctgtgagcctggctatgacctcagaggggctgcgtctctgcactgcacaccccagggagactggagccctgaagccccgagatgtgcagtgaaatcctgtgatgacttcttgggtcaactccctcatggccgtgtgctatttccacttaatctccagcttggggcaaaggtgtcctttgtctgtgatgaagggtttcgcttaaagggcagttccgttagtcattgtgtcttggttggaatgagaagcctttggaataacagtgttcctgtgtgtgaacatatcttttgtccaaatcctccagctatccttaatgggagacacacaggaactccctctggagatattccctatggaaaagaaatatcttacacatgtgacccccacccagacagagggatgaccttcaacctcattggggagagcaccatccgctgcacaagtgaccctcatgggaatggggtttggagcagccctgcccctcgctgtgaactttctgttcgtgctggtcactgtaaaaccccagagcagtttccatttgccagtcctacgatcccaattaatgactttgagtttccagtcgggacatctttgaattatgaatgccgtcctgggtattttgggaaaatgttctctatctcctgcctagaaaacttggtctggtcaagtgttgaagacaactgtagacgaaaatcatgtggacctccaccagaacccttcaatggaatggtgcatataaacacagatacacagtttggatcaacagttaattattcttgtaatgaagggtttcgactcattggttccccatctactacttgtctcgtctcaggcaataatgtcacatgggataagaaggcacctatttgtgagatcatatcttgtgagccacctccaaccatatccaatggagacttctacagcaacaatagaacatcttttcacaatggaacggtggtaacttaccagtgccacactggaccagatggagaacagctgtttgagcttgtgggagaacggtcaatatattgcaccagcaaagatgatcaagttggtgtttggagcagccctccccctcggtgtatttctactaataaatgcacagctccagaagttgaaaatgcaattagagtaccaggaaacaggagtttctttaccctcactgagatcatcagatttagatgtcagcccgggtttgtcatggtagggtcccacactgtgcagtgccagaccaatggcagatgggggcccaagctgccacactgctccagggtgtgtcagccgcctccagaaatcctgcatggtgagcataccctaagccatcaggacaacttttcacctgggcaggaagtgttctacagctgtgagcccagctatgacctcagaggggctgcgtctctgcactgcacgccccagggagactggagccctgaagcccctagatgtacagtgaaatcctgtgatgacttcctgggccaactccctcatggccgtgtgctacttccacttaatctccagcttggggcaaaggtgtcctttgtttgcgatgaagggttccgattaaaaggcaggtctgctagtcattgtgtcttggctggaatgaaagccctttggaatagcagtgttccagtgtgtgaacaaatcttttgtccaaatcctccagctatccttaatgggagacacacaggaactccctttggagatattccctatggaaaagaaatatcttacgcatgcgacacccacccagacagagggatgaccttcaacctcattggggagagctccatccgctgcacaagtgaccctcaagggaatggggtttggagcagccctgcccctcgctgtgaactttctgttcctgctgcctgcccacatccacccaagatccaaaacgggcattacattggaggacacgtatctctatatcttcctgggatgacaatcagctacatttgtgaccccggctacctgttagtgggaaagggcttcattttctgtacagaccagggaatctggagccaattggatcattattgcaaagaagtaaattgtagcttcccactgtttatgaatggaatctcgaaggagttagaaatgaaaaaagtatatcactatggagattatgtgactttgaagtgtgaagatgggtatactctggaaggcagtccctggagccagtgccaggcggatgacagatgggaccctcctctggccaaatgtacctctcgtacacatgatgctctcatagttggcactttatctggtacgatcttctttattttactcatcattttcctctcttggataattctaaagcacagaaaaggcaataatgcacatgaaaaccctaaagaagtggctatccatttacattctcaaggaggcagcagcgttcatccccgaactctgcaaacaaatgaagaaaatagcagggtccttccttgacaaagtactatacagctgaagaacatctcgaatacaattttggtgggaaaggagccaattgatttcaacagaatcagatctgagcttcataaagtctttgaagtgacttcacagagacgcagacatgtgcacttgaagatgctgccccttccctggtacctagcaaagctcctgcctctttgtgtgcgtcactgtgaaacccccacccttctgcctcgtgctaaacgcacacagtatctagtcaggggaaaagactgcatttaggagatagaaaatagtttggattacttaaaggaataaggtgttgcctggaatttctggtttgtaaggtggtcactgttcttttttaaaatatttgtaatatggaatgggctcagtaagaagagcttggaaaatgcagaaagttatgaaaaataagtcacttataattatgctacctactgataaccactcctaatattttgattcattttctgcctatcttctttcacatatgtgtttttttacatacgtacttttcccccttagtttgtttccttttattttatagagcagaaccctagtcttttaaacagtttagagtgaaatatatgctatatcagtttttactttctctagggagaaaaattaatttactagaaaggcatgaaatgatcatgggaagagtggttaagactactgaagagaaatatttggaaaataagatttcgatatcttctttttttttgagatggagtctggctctgtctcccaggctggagtgcagtggcgtaatctcggctcactgcaagctccgcctcccgggttgacaccattttcctgcctcagcctcctgagtagttgggattaccagtagatgggactacaggcacctgccaacacgcccggctaatttttttgtatttttagtagagacggggtttcaccatgttagccaggatggtctggatctcctgacctcgtgatccacctgcctcggcctcccaaagtgctgcgattacaggcatgagccaccgcgcctggccgctttcgatattttctaaactttaattcaaaagcactttgtgctgtgttctatataaaaaacataataaaaattgaaatgaaagaataattgttattataaaagtactagcttacttttgtatggattcagaatatactaaattaactttttaaaacacaacttttaaaaaatgtatcaaaataataaacgtgttctgatatttttaaaataagtgaccttgtgttctttaaccagtccacatctttagagaacaaaaatgtgttatgatattatgggccatgctaatgacctctagaaaacatcagaatatttctggatatttaataatagctttatatatgactaatgctcatttctatgtaattctgtttaatagttgctttaaaggtgaattttgccacatttactttgacagcagtataaggagtgagatagacatgaacctgaatttcaatttaaaatcatggaagagagggaaaaaaaaccagcttaagaaaaatcaactgataaactgcaagaaaaaaatgcaacttacatcacaaaagctaattgctttattatttagagagtacttaaaaattaaagaccaaacttctctccacccaacaaaaatgggcaaaggacatacagctaggtcaccaagaaagaagggcaaataggtggtgagtatatgtaaagatacttgataggacttttgcttagttgaatctttagcaaatctcttttatttcttgggattttgaagaagtaatttttaaaggaggactagaaactaagtgattgggaattggcctttttagaattaaaatttcccattacaagaaaaaaaaatcctgtgttcttttttttttccagaatggagtaggtcagtgagcaatgtgattaataaatatttcaatgtctgtgacttttgatttattttggagacagggtcttgctctgttacccaggctggagtgcagtggtgctatctaggcttactgcaacctcacctgtcactttttaattgcaagaaagctgaaaggtttttttctattatatcagttataatgataaatactgtatatactaactatgagtaaaatactatattgcctaacttgtattattaagcaattctgctaacctgtgaccttacattttcatctgaaaagcaggggctggacaccaattgccctatgaagctattgctagtcctaacattctttgttttgtttgcttttttggcacacttaagtgtgtactatgaagtttatgatgctttaatgaaattttctgtctctaccattgtaatgagaaaggaataaaatactttattttgcaaatctaaaaaaaaaaaaaa

SEQ ID NO: 298 - DNA, 1611 bp, HOMO SAPIENS
gtgacaacgggggcgaagcgcaggcgcaaggagcaagcgcagattgtgggcggctgtgtcagctgacccaaggggccttcgaggtgccttaggccgcttgccttgctctcagaatcgctgccgccatggctagtcagtctcaggggattcagcagctgctgcaggccgagaagcgggcagccgagaaggtgtccgaggcccgcaaaagaaagaaccggaggctgaagcaggccaaagaagaagctcaggctgaaattgaacagtaccgcctgcagagggagaaagaattcaaggccaaggaagctgcggcattgggatcccgtggcagttgcagcactgaagtggagaaggagacccaggagaagatgaccatcctccagacatacttccggcagaacagggatgaagtcttggacaacctcttggcttttgtctgtgacattcggccagaaatccatgaaaactaccgcataaatggatagaagagagaagcacctgtgctgtggagtggcattttagatgccctcacgaatatgaagcttagcacagctctagttacattcttatgatatggcattaaattatttccatatattatataataggtccttccactttttggagagtagcaaatctagcttttttgtacagacttagaaattatctaaagatttcatctttttacctcatatttcttaggaatttaatggttatatgttgtctttttttcctatgtcttttggctcaagcaacatgtatatcagtgttgactttttctttcttagatctagtttaaaaaaaaaaaaaaccacataacaattctttgaagaaaggaagggattaaataatttttttccctaacactttcttgaaggtcaggggctttatctatgaaaaagtagtaaatagttctttgtaacctgtgtgaagcagcagccagccttaaagtagtccattcttgctaatggttagaacagtgaatactagtggaattgtttgggctgcttttagtttctcttaatcaaaattactagatgatagaattcaagaacttgttacatgtattacttggtgtatcgataatcatttaaaagtaaagactctgtcatgcatttttccccattcttttttttttccctgtctccgtgacaaccagtggttcttcatttttgatcatgcgaaatgcattttgacccagatggtctgcagaacttcacttaggacattagcacacaaatagcacacatatcacatacccatttatatacataattagaaaatgttcctgatacatgtgtcatgtgatttcttccaacaaatgttttggaaaacagcaagcaactagtctgtaggttgtcttttctctagagatccttgtcctgggacagcctggggcaagttattaagcatatttccttcctggtgggctagatgatgtgcattatacctgtagtaccttcatactagcccttacaagttaaatgtcctgtggccatcttagccgaaagtctttggttgcaaaatcttataggtaaaaacagttgaaagaacattatgggatttccttgcttgttctgatacaatacaactagatgaccttaaaaaccctca

SEQ ID NO: 299 - DNA, 1108 bp, HOMO SAPIENS
cgagccgcgaagattgtttttgtcccgccgaaatcgagcaaagcacgctggaacttgtagtccttgaggccccttccctaggtccttcgagctactccgtctggccccgccttttctctgctctcctgaacctttaggcttgtctcggcccatttgaagaccaggaagttgatcaatcccgaggctgctgagagacggtggcgcgattgggacagtcgccagggatggctgagcgtgaagatgcagcgggtgtccgggctgctctcctggacgctgagcagagtcctgtggctctccggcctctctgagccgggagctgcccggcagccccggatcatggaagagaaagcgctagaagtttatgatttgattagaactatccgggacccagaaaagcccaatactttagaagaactggaagtggtctcggaaagttgtgtggaagttcaggagataaatgaagaagaatatctggttattatcaggttcacgccaacagtacctcattgctctttggcgactcttattgggctgtgcttaagagtaaaacttcagcgatgtttaccatttaaacataagttggaaatctacatttctgaaggaacccactcaacagaagaagacatcaataagcagataaatgacaaagagcgagtggcagctgcaatggaaaaccccaacttacgggaaattgtggaacagtgtgtccttgaacctgactgatagctgttttaagagccactggcctgtaattgtttgatatatttgtttaaactctttgtataatgtcagagactcatgtttaatacataggtgatttgtacctcagagtattttttaaaggattctttccaagcgagatttaattataaggtagtacctaatttgttcaatgtataacattctcaggatttgtaacacttaaatgatcagacagaataatattttctagttattatgtgtaagatgagttgctatttttctgatgctcattctgatacaactatttttcgtgtcaaatatctactgtgcccaaatgtactcaatttaaatcattactctgtaaaataaataagcagatgattcttataaaaaaaaaaaaaaaaaa

SEQ ID NO: 300 - DNA, 1912 bp, HOMO SAPIENS
ttttttttcttccctctagtgggcggggcagaggagttagccaagatgtgactttgaaaccctcagcgtctcagtgcccttttgttctaaacaaagaattttgtaattggttctaccaaagaaggatataatgaagtcactatgggaaaagatggggaggagagttgtaggattctacattaattctcttgtgcccttagcccactacttcagaatttcctgaagaaagcaagcctgaattggttttttaaattgctttaaaaattttttttaactgggttaatgcttgctgaattggaagtgaatgtccattcctttgcctcttttgcagatatacacttcagataactacaccgaggaaatgggctcaggggactatgactccatgaaggaaccctgtttccgtgaagaaaatgctaatttcaataaaatcttcctgcccaccatctactccatcatcttcttaactggcattgtgggcaatggattggtcatcctggtcatgggttaccagaagaaactgagaagcatgacggacaagtacaggctgcacctgtcagtggccgacctcctctttgtcatcacgcttcccttctgggcagttgatgccgtggcaaactggtactttgggaacttcctatgcaaggcagtccatgtcatctacacagtcaacctctacagcagtgtcctcatcctggccttcatcagtctggaccgctacctggccatcgtccacgccaccaacagtcagaggccaaggaagctgttggctgaaaaggtggtctatgttggcgtctggatccctgccctcctgctgactattcccgacttcatctttgccaacgtcagtgaggcagatgacagatatatctgtgaccgcttctaccccaatgacttgtgggtggttgtgttccagtttcagcacatcatggttggccttatcctgcctggtattgtcatcctgtcctgctattgcattatcatctccaagctgtcacactccaagggccaccagaagcgcaaggccctcaagaccacagtcatcctcatcctggctttcttcgcctgttggctgccttactacattgggatcagcatcgactccttcatcctcctggaaatcatcaagcaagggtgtgagtttgagaacactgtgcacaagtggatttccatcaccgaggccctagctttcttccactgttgtctgaaccccatcctctatgctttccttggagccaaatttaaaacctctgcccagcacgcactcacctctgtgagcagagggtccagcctcaagatcctctccaaaggaaagcgaggtggacattcatctgtttccactgagtctgagtcttcaagttttcactccagctaacacagatgtaaaagacttttttttatacgataaataacttttttttaagttacacatttttcagatataaaagactgaccaatattgtacagtttttattgcttgttggatttttgtcttgtgtttctttagtttttgtgaagtttaattgacttatttatataaattttttttgtttcatattgatgtgtgtctaggcaggacctgtggccaagttcttagttgctgtatgtctcgtggtaggactgtagaaaagggaactgaacattccagagcgtgtagtgaatcacgtaaagctagaaatgatccccagctgtttatgcatagataatctctccattcccgtggaacgtttttcctgttcttaagacgtgattttgctgtagaagatggcacttataaccaaagcccaaagtggtatagaaatgctggtttttcagttttcaggagtgggttgatttcagcacctacagtgtacagtcttgtattaagttgttaataaaagtacatgttaaacttaaaaaaaaaaaaaaaaaa

SEQ ID NO: 301 - DNA, 2333 bp, HOMO SAPIENS
cggagcggggaacgaggccgtcggccattttgtgtctgcttcctgtgggacgtggtggtagccgttgggttgggaaagtgagggatttttggcctcgtttctcctgcttcttttctcctcccttttactttgccggtagaacacagttatgggtcgcaagaagaagaagcagctgaagccgtggtgctggtattgtaatagagattttgatgatgagaagatccttattcagcaccaaaaagcaaagcattttaaatgccatatatgtcacaagaaattgtatacaggacctggcttagctattcattgcatgcaggtacataaagaaacaatagatgccgtaccaaatgcaatacctggaagaacagacatagagttggaaatatatggtatggaaggtattccagaaaaagacatggatgaaagacgacgacttcttgaacagaaaacacaagaaagtcaaaaaaagaagcaacaagatgattctgatgaatatgatgatgacgactctgcagcctcaacttcatttcagccacagcctgttcaacctcagcaaggttatattcctccaatggcacagccaggactgccaccagtaccaggagcaccaggaatgcctccaggcatacctccattaatgccaggtgttcctcctctgatgccaggaatgccaccagttatgccaggcatgccacctggattgcatcatcagagaaaatacacccagtcattttgcggtgaaaacataatgatgccaatgggtggaatgatgccacctggaccaggaataccacctctgatgcctggaatgccaccaggtatgcccccacctgttccacgtcctggaattcctccaatgactcaagcacaggctgtttcagcgccaggtattcttaatagaccacctgcaccaacagcaactgtacctgccccacagcctccagttactaagcctcttttccccagtgctggacagatggggacacctgtcacaagctcaagtacagcttcatccaattcagaaagtctgtctgcatcttctaaagctctgtttcctagcacagcacaagctcaggcagctgtccaaggacctgttggtacagatttcaaacccttaaatagtacccctgcaacaactacagaacccccaaagcctacattccctgcttatacacagtctacagcttcaacaactagtacaacaaatagtactgcagctaaaccagcggcttcaataacaagtaagcctgctacacttacaacaactagtgcaaccagtaagttgatccatccagatgaggatatatccctggaagagagaagggcacagttacctaagtatcaacgtaatcttcctcggccaggacaggcccccatcggtaatccaccagttggaccaattggaggtatgatgccaccacagccaggcatcccacagcaacaaggaatgagacccccaatgccacctcatggtcagtatggtggtcatcatcaaggcatgccaggataccttcctggtgctatgcccccgtatgggcagggaccgccaatggtgcccccttaccagggtgggcctcctcgacctccgatgggaatgagacctcctgtaatgtcgcaaggtggccgttactgatcttacttcatccagtctaataggtttggagattaaaccttttctcaacttgtgctgtttatatagccaagcttccgtcaataaggcttcattgtgactttaacaaacattatcttcccacataccaggaactattggacatttattttacatgggaaaaattatttggaataataaagcaggaacttttcctgaagttgcaatttatactgtatggcttctttttcatgtttcatctaggtttttagaagtgaagtatagtaaatttggttcgttaaattgtgaaggcgctggaattacatgaacataccaccctagtaaaggcaagttctgtaagcttacattgctatttgtaaagtttgccttcacagcatttcagatgctgttggacttcatgtccccaacctagcttggtgagggctgtaactgtttccaagtacttgtacattggaagtctgaatgtgtaacaatatttaatgtatttagagttcctcatgttgcagggtttaagaaatctgacccaccaaggtcatgtgacttttctgtactgttaaacttcattgtaataaaatgagagaaaaatttatgcctttttattcataacccagctgtggaccactgcctgaaaggtttgtacagatgcatgccacagtagatgtccacataataaaattcatagttaccaatgcaaaaaaaaaaa

SEQ ID NO: 302 - DNA, 2005 bp, HOMO SAPIENS
gcggattcccgccccgaggtttctaaatccagacattcccgtttggctgagcactctaggcctacatccatgaagctaggagagcgacactcaaagactgcactattgagagaagctaacgttaaaggcagtgaatatattcgggagtccagctccggaacccgggagctcttttagtgggaggggcggcgctgatggcgcttctggcctccgaatgctagggggcgctgtgatcgccgggcggcctcttgggcgctgggagtccaccgcgcaagcgcatcctggcctttcttcagtccccacgtgcgatccttcccggcaactttttcgagaaaaatgcccaaattcaaggcggcccgtggggtggggggtcaggaaaaacatgcgcccctggccgatcagatcctggctgggaatgcggtgcgggcgggggtccgggagaagcggcggggtcgcgggacaggagaagcggaggaagagtatgtggggccccggctgagccgacggattttgcagcaagcacggcagcaacaggaggaactcgaggccgagcatgggactggggacaagcccgcggcgccgcgggaacgcaccacgcggctgggtccaagaatgcctcaggatggatcagatgacgaggacgaggagtggcccaccctggagaaggctgccacaatgacagcagcgggccatcatgcagaggtggttgtggaccctgaggatgagcgtgccatagagatgttcatgaacaagaaccctcctgccaggcgcaccctggctgacatcatcatggagaagctgactgagaagcagacagaggttgagacagtcatgtcagaggtgtcgggcttccctatgccccagctggacccccgggtcctagaagtgtacaggggggtccgggaggtattatctaagtaccgcagtggaaaactgcccaaggcatttaagatcatccctgcactctccaactgggagcaaatcctctacgtcacagagccggaggcctggactgcagctgccatgtaccaggccaccaggatttttgcctctaacctgaaggaacgcatggcccagcgcttctacaaccttgtcctgctccctcgagtacgagatgacgttgctgaatacaaacgactcaacttccatctctacatggctctcaagaaggcccttttcaaacctggagcctggttcaaagggatcctgattccactgtgcgagtctggcacttgtaccctccgggaagccatcattgtgggtagcatcatcaccaagtgctccatccctgtgttgcactccagtgcggccatgctgaaaattgctgagatggaatacagcggtgccaacagcatcttcctgcgactgctgctggataagaagtatgcactgccttaccgggtgctggatgccctagtcttccacttcctggggttccggacagagaagcgtgaactgcctgtgctgtggcaccagtgcctcctgactttggtccagcgctacaaggccgacttggccacagaccagaaagaggccctcttagaactgctccggctgcagccccatccacagctatcgcccgaaatcaggcgtgagcttcagagtgcagtcccccgcgatgtggaagatgttcccatcaccgtggagtgaggaaaacagtcagctgtcctggccaaaggggtttggaaggacaccaagacccccgttggtgactgaagatgacactgagctttaatggctgaagacccagatcagggcagtgacagatcacagggacatctgtggctcccagtccaggacaggaaggactgagggtctggctggttccctcttccattctaggcccttatccctgtttagttctgagagccaacttgagataccatatgctagcattcccagtccccagctggggcttggtgtgagtactttttctatggctattgtgtcaggtcactgtggataaaggcaaagacagatatttattgaaaaaaaaaaaaaaaaa

SEQ ID NO: 303 - DNA, 2482 bp, HOMO SAPIENS
tgcgctgcccggggcggccagagccctgcagaacaaaccgccgcacggaattaggggccgccgtccgcgcctgccaggcttggaagcggactcgcccccagggccaccgccctaggaaacctcccgtcggaagcctcccaagcaagccgctcacccgcggctcccgcgcgaggcggcgtgggcgtgggcgcggccctggcgcggcggcgcgcgcggggtgaagggagcccggcgcgctggctgcggcgacggcggccgttgctgcgccgggtactggggtcgctgcctgaggcgcaggcgccgtggactccacccgccccggggcctgggctcgctgtggactcgtcatggcgaccgagcagaggcctttccacctggtggtgttcggcgcgtctggcttcaccggccagttcgtgaccgaggaggtggcccgggagcaggtggacccggagcggagctcccgcctgccctgggccgtggcgggccgctcccgggagaagctgcagcgggtgctggagaaggcggccctgaagctgggaagaccaacactgtcatctgaagttggaatcatcatctgtgatattgctaatccagcctcgcttgatgaaatggctaaacaggcaacagttgtcctcaattgcgtaggaccatatcggttttatggagaacctgtaataaaagcatgtattgaaaatggagccagttgtatcgacatcagtggagaacctcagtttctggaactaatgcaactgaagtatcatgagaaagctgcagacaaaggggtttatatcattggaagcagcggctttgactccattccagcagatctgggagtaatatataccagaaataaaatgaatggtactttgactgctgtggaaagtttcctgactatacattcaggacctgaggggttgagcattcatgatggtacctggaagtcagcaatttatggttttggagatcagagtaatttgagaaaactaagaaatgtatcaaatctgaaacctgtcccgctcattggtccaaaattgaagagaaggtggccaatttcttattgtcgggaactcaaaggttattccattccttttatgggatctgatgtgtctgttgtaaggaggactcaacgttacttgtatgaaaatttagaggaatcaccagttcagtatgctgcgtatgtaactgtgggaggcatcacctctgttattaagctgatgtttgcaggacttttctttttgttctttgtgaggtttggaattggaaggcaacttctcataaaattcccatggttcttctcctttggctatttttcaaaacaaggcccaacacaaaaacagattgatgctgcctcattcacgctgacattctttggtcaaggatacagccaaggcactggtacagataagaacaaaccaaatatcaaaatttgtactcaggtgaaaggaccagaggctggctatgtggctacccccatagctatggttcaggcagccatgactcttctaagtgatgcttctcatctgcctaaggcgggcggggtcttcacacctggagcagctttttccaaaacaaagttgattgacagactcaacaaacacggtattgagtttagtgttattagcagctctgaagtctaaacactggaagaattaactgaagtcataacgtgcgtgaattaacagcttctctatttgatatttgaaattcttctgtaagcctgtctgagtgtatgtggaaacgattgtcaaatctaaaatatctatatattaaaaagtaggaaattgtcctagcttaccctaaatttcaaatctgagttgattttgtgattttattgcttataacagagaactcatatttgacatatttttttcattgatgtgttcctggtagattttcacgaatgagctggcaggtctaatgggggaggcggcgtcccagtctgtgttgcagcagcattctcatcgggggtgcgcacaccatcgttactgtcgggcagtaactgccgcttgccttgccgcagtaggagggaaatctcaccttccttccacatactgtcttgagcctttgctaaattaaactgcactttttgctatttttgcctagtttttcgccaatctacactgattttggactgttacctaagttgaaaaataaaaggttgtcaatcgaatggtggtttaatgtttggacctgccgatgtatttgtatagtggtagaaacatgctgcttaagtggcctaacctgtttcttgccaataagtaggcttatcattttatctttacgtaattctatatctgtgactaggtttttaaggatacagcttataagttgctatcaattttcactacctaagcagaatttttctctaatttactttttgtattttaactaggttttacatggaagccctaaaataaggcaaaagactttttcttttgtaataagcatataataaacacgtatatacatagcaaaaaaaaaa

SEQ ID NO: 304 - DNA, 1690 bp, HOMO SAPIENS
tgctttctcaaaggccccacagtcctccacttcctggggaggtagctgcagaataaaaccagcagagactccttttctcctaaccgtcccggccaccgctgcctcagcctctgcctcccagcctctttctgagggaaaggacaagatgaagtggaaggcgcttttcaccgcggccatcctgcaggcacagttgccgattacagaggcacagagctttggcctgctggatcccaaactctgctacctgctggatggaatcctcttcatctatggtgtcattctcactgccttgttcctgagagtgaagttcagcaggagcgcagacgcccccgcgtaccagcagggccagaaccagctctataacgagctcaatctaggacgaagagaggagtacgatgttttggacaagagacgtggccgggaccctgagatggggggaaagccgcagagaaggaagaaccctcaggaaggcctgtacaatgaactgcagaaagataagatggcggaggcctacagtgagattgggatgaaaggcgagcgccggaggggcaaggggcacgatggcctttaccagggtctcagtacagccaccaaggacacctacgacgcccttcacatgcaggccctgccccctcgctaacagccaggggatttcaccactcaaaggccagacctgcagacgcccagattatgagacacaggatgaagcatttacaacccggttcactcttctcagccactgaagtattcccctttatgtacaggatgctttggttatatttagctccaaaccttcacacacagactgttgtccctgcactctttaagggagtgtactcccagggcttacggccctggccttgggccctctggtttgccggtggtgcaggtagacctgtctcctggcggttcctcgttctccctgggaggcgggcgcactgcctctcacagctgagttgttgagtctgttttgtaaagtccccagagaaagcgcagatgctagcacatgccctaatgtctgtatcactctgtgtctgagtggcttcactcctgctgtaaatttggcttctgttgtcaccttcacctcctttcaaggtaactgtactgggccatgttgtgcctccctggtgagagggccgggcagaggggcagatggaaaggagcctaggccaggtgcaaccagggagctgcaggggcatgggaaggtgggcgggcaggggagggtcagccagggcctgcgagggcagcgggagcctccctgcctcaggcctctgtgccgcaccattgaactgtaccatgtgctacaggggccagaagatgaacagactgaccttgatgagctgtgcacaaagtggcataaaaaacatgtggttacacagtgtgaataaagtgctgcggagcaagaggaggccgttgattcacttcacgctttcagcgaatgacaaaatcatctttgtgaaggcctcgcaggaagacccaacacatgggacctataactgcccagcggacagtggcaggacaggaaaaacccgtcaatgtactaggatactgctgcgtcattacagggcacaggccatggatggaaaacgctctctgctctgctttttttctactgttttaatttatactggcatgctaaagccttcctattttgcataataaatgcttcagtgaaaatgcaaaaaaaaaa

SEQ ID NO: 305 - DNA, 3344 bp, HOMO SAPIENS; identical to SEQ ID NO: 199

SEQ ID NO: 306 - DNA, 1559 bp, HOMO SAPIENS
cttggaccttggccctcgctttccaggatgggtagggtggaagacgggggaacaactgaggagctggaggactgggacccaggcaccagtgccctgccagctcctgggatcaagcagggtcccagggaacagacaggcacggggcccctgtcccaaaagtgctgggagcctgagcctgatgctcccagccagcctggcccagccctttggtccaggggtcgggcccgcactcaggccttggctggcggctcctcactgcagcagctggaccccgagaacacaggcttcatcggtgcggacaccttcactggcctggtgcacagccatgagctgcccctggacccggccaagctggacatgctggtggccctggctcagagcaacgagcagggccaggtctgctaccaggagctggtggacctgatcagcagcaagcgctccagcagtttcaagcgggccattgctaacggacagcgggcactgccccgggacgggccgctggatgagccaggcctaggtgtctacaagcggtttgtgcgttacgtggcctacgagatcctgccttgtgaggtggaccgccgctggtacttctaccgtcaccgcagctgcccaccccccgtgttcatggcctcggtcactcttgcccagatcatcgtgttcctgtgttacggggcccgcctcaacaagtgggtgctgcagacctaccaccccgagtacatgaagagcccccttgtgtaccaccccgggcaccgtgcccgcgcctggcgcttcctcacctacatgttcatgcacgttgggctggagcagctggggttcaacgccctcctgcagctgatgatcggggtgcccctggagatggtgcacggcctgctccgcatcagcctgctctacctggcaggcgtgctggcaggctccctaaccgtctccatcaccgacatgcgggccccggtggtgggaggctccggcggggtctacgccctgtgctcggcacacctggccaacgttgtcatgaactgggctgggatgagatgtccctacaagttgctgaggatggtgctggccttggtgtgcatgagctccgaggtgggccgggccgtgtggctgcgcttctccccgccgctgcccgcctcgggcccacagcccagcttcatggcgcacctggcaggcgcggtggtgggggtgagcatgggcctgaccatcctgcggagctacgaggagcgcctgcgggaccagtgcggctggtgggtggtgctgctggcctacggcaccttcctgctcttcgccgtcttctggaacgtcttcgcctacgacctgctgggcgcccacatccccccaccgccctgaccggctacctgaggctgcacaggccagggctcgggcatgtggtggccgcccaccaggggccttcacgtctgccctttgtgaacggacgtctcagggctgctgtgccccttgggtgtgggtggcctcaaaggaggccctgtcccagccacccaccccccactcccaggacttgcggtctgagcctttttggataattaataaatattttacacagc

SEQ ID NO: 307 - DNA, 1691 bp, HOMO SAPIENS
agaactaaggctgtgggtaaggcgacatttcctgcccccggggccagggtgagaggagagatgatgagttgctgagtgtgcacacctttccggaacacatacacacaccctgctctgggatcccttgtgaggctgccctcatggagttccccctggcccagatatgtccccaagggagtcacgaagcccccatcccaaccttcagcaccttccagatcacagacatgacccgcaggagctgccagaacctgggctacactgcggcatctccccaggccccggaggctgcctccaacacagggaatgctgagagggcagaggaggtgcctggagaaggaagcctgttcctgcaggccgagacccgggcttggttccagaagacccaggcccactggctcctgcagcacggggcagcccctgcctggttccatggcttcatcacccggagggttcggccccctctctccgtcacccacagggaggcagagaggctgctggagcccaagcctcaggggtgctacttggtgcggttcagcgagagcgcggtgaccttcgtgctgacttacaggagccggacttgctgccgccacttcctgctggcccagctcagggacgggcgccacgtggtgctgggcgaggacagcgcccacgcgcggctgcaggacctgctgctgcactacaccgcgcacccgctcagcccctacggggagacgctcaccgagcccctcgcccgacagactcctgagcctgcaggactttccctgaggaccgaagaatcaaactttggaagcaaaagccaggacccaaacccccagtacagcccaatcatcaaacaggggcaagccccagtcccgatgcagaaagagggggccggggagaaggagccctcccagctgctcaggcccaagcctcccatccccgccaaacctcagctgcccccagaagtctacacaatccctgttccacgacaccgcccggccccacgccccaagccctccaatcctatctacaatgagcctgatgaacccatagctttctatgccatgggccggggcagccctggggaagcccccagcaacatctatgtggaagtggaagatgagggcctacccgccacccttgggcaccctgtcctacggaagagctggtccaggcctgtcccaggaggccagaatacaggtggctcccagctgcattctgagaactctgtgattgggcaaggccctcccctgccccaccagcccccacccgcctggagacacaccctcccccacaatctttctagacaggtgcttcaggacagaggacaggcatggcttccccttgggcctcctcagtaggcggtctggcctgacccccaacaaagaagcctggaggtcagagaagcaaatgcggagcctgctccctcctaagaagatcccaagaatccaatggctcagtccttggtgatctaagacagcaaagaagtgtgcaaggagggccctgttagctcccactgtcctggtttctcctcctggagtctaatttccttggccctctgagccttttgagtctgggccctggtccaatgctgctgttgtctgaggaatggtttggtgagaacagatgttagaacttgtttgttgattcttgtctggctaataaatcatcaccaactgccttctcctacagggaaaaaaaaaaaaaaaaaa

SEQ ID NO: 308 - DNA, 5896 bp, HOMO SAPIENS
gcatgcgcagtgcgcagggccggctcgaagcgcaagcaggaagcgtttgcggtgatcccggcgactgcgctggctaatgcggtaccggctagcgtggcttctgcaccccgcactgcccagcaccttccgctcagtcctcggcgcccgcctgccgcctccggagcgcctgtgtggtttccaaaaaaagacttacagcaaaatgaataatccagccatcaagagaataggaaatcacattaccaagtctcctgaagacaagcgagaatatcgagggctagagctggccaatggtatcaaagtacttcttatcagtgatcccaccacggataagtcatcagcagcacttgatgtgcacataggttcattgtcggatcctccaaatattgctggcttaagtcatttttgtgaacatatgctttttttgggaacaaagaaataccctaaagaaaatgaatacagccagtttctcagtgagcatgcaggaagttcaaatgcctttactagtggagagcataccaattactattttgatgtttctcatgaacacctagaaggtgccctagacaggtttgcacagttttttctgtgccccttgttcgatgaaagttgcaaagacagagaggtgaatgcagttgattcagaacatgagaagaatgtgatgaatgatgcctggagactctttcaattggaaaaagctacagggaatcctaaacaccccttcagtaaatttgggacaggtaacaaatatactctggagactagaccaaaccaagaaggcattgatgtaagacaagagctactgaaattccattctgcttactattcatccaacttaatggctgtttgtgttttaggtcgagaatctttagatgacttgactaatctggtggtaaagttattttctgaagtagagaacaaaaatgttccattgccagaatttcctgaacaccctttccaagaagaacatcttaaacaactttacaaaatagtacccattaaagatattaggaatctctatgtgacatttcccatacctgaccttcagaaatactacaaatcaaatcctggtcattatcttggtcatctcattgggcatgaaggtcctggaagtctgttatcagaacttaagtcaaagggctgggttaatactcttgttggtgggcagaaggaaggagcccgaggttttatgttttttatcattaatgtggacttgaccgaggaaggattattacatgttgaagatataattttgcacatgtttcaatacattcagaagttacgtgcagaaggacctcaagaatgggttttccaagagtgcaaggacttgaatgctgttgcttttaggtttaaagacaaagagaggccacggggctatacatctaagattgcaggaatattgcattattatcccctagaagaggtgctcacagcggaatatttactggaagaatttagacctgacttaatagagatggttctcgataaactcagaccagaaaatgtccgggttgccatagtttctaaatcttttgaaggaaaaactgatcgcacagaagagtggtatggaacccagtacaaacaagaagctataccggatgaagtcatcaagaaatggcaaaatgctgacctgaatgggaaatttaaacttcctacaaagaatgaatttattcctacgaattttgagattttaccgttagaaaaagaggcgacaccataccctgctcttattaaggatacagctatgagcaaactttggttcaaacaagatgataagttttttttgccgaaggcttgtctcaactttgaatttttcagcccatttgcttatgtggaccccttgcactgtaacatggcctatttgtaccttgagctcctcaaagactcactcaacgagtatgcatatgcagcagagctagcaggcttgagctatgatctccaaaataccatctatgggatgtatctttcagtgaaaggttacaatgacaagcagccaattttactaaagaagattattgagaaaatggctacctttgagattgatgaaaaaagatttgaaattatcaaagaagcatatatgcgatctcttaacaatttccgggctgaacagcctcaccagcatgccatgtactacctccgcttgctgatgactgaagtggcctggactaaagatgagttaaaagaagctctggatgatgtaacccttcctcgccttaaggccttcatacctcagctcctgtcacggctgcacattgaagcccttctccatggaaacataacaaagcaggctgcattaggaattatgcagatggttgaagacaccctcattgaacatgctcataccaaacctctccttccaagtcagctggttcggtatagagaagttcagctccctgacagaggatggtttgtttatcagcagagaaatgaagttcacaataactgtggcatcgagatatactaccaaacagacatgcaaagcacctcagagaatatgtttctggagctcttctgtcagattatctcggaaccttgcttcaacaccctgcgcaccaaggagcagttgggctatatcgtcttcagcgggccacgtcgagctaatggcatacagggcttgagattcatcatccagtcagaaaagccacctcactacctagaaagcagagtggaagctttcttaattaccatggaaaagtccatagaggacatgacagaagaggccttccaaaaacacattcaggcattagcaattcgtcgactagacaaaccaaagaagctatctgctgagtgtgctaaatactggggagaaatcatctcccagcaatataattttgacagagataacactgaggttgcatatttaaagacacttaccaaggaagatatcatcaaattctacaaggaaatgttggcagtagatgctccaaggagacataaggtatccgtccatgttcttgccagggaaatggattcttgtcctgttgttggagagttcccatgtcaaaatgacataaatttgtcacaagcaccagccttgccacaacctgaagtgattcagaacatgaccgaattcaagcgtggtctgccactgtttccccttgtgaaaccacatattaacttcatggctgcaaaactctgaagattccccatgcatgggaaagtgcaagtggatgcattcctgagtcttccagagcctaagaaaatcatcttggccactttaatagtttctgattcactattagagaaacaaacaaaaaattgtcaaatgtcattatgtagaaatattataaatccaaagtaaattacaaaatcttatagatgtagaatattttttaaatacatgcctcttaaatattttaaaatttttcttttgattactgagagaaatttccccaatataacaatgcttaaaatgaatgatattcctatagaatcttccttccctattctgtaaaatagtcacttgtccgaagaaagttaaaagttagctcttttctaaaagcctcctagcttgacatagaaggcttcacaacatttagaaaggtaataactttttaaaaattgatcctcaaatttgctttctacttgatggtttcatgtaaatcagtggaaaacattacatttggcagatgataaagcaatgtcatcttttattagtgaaatgctggttatataaggcatggttttaatctttttataaaatttgaacatgttttttatgccaactcgtaaaatgctagaaaaccctacttatttacaatgctagaaatacagacttaccttacatcaattttgtcctaaaccgaatttctcaggattactgtggtttctttcattctgattgaattatattgacctacttcttcatagttggtttgcagtgttccatgagttttacttttcctcatcaacatattgctttaacacaacatatttatttaacacgtacaaatagggtcaacttcagatcctactgagtgtgtgacatgcttttccaacatcagctttttgtaaccacctgtataactttttattacagtgaaattgcagtcagtatgtgaaccaaaatatcttgcccctttatgaatttaaaaggcagccaatacaaagccacctttttggaaatataaaaagtaaagccttgcattcttatatagcaggtcttcataaaactctaaaatcccttgttgctaccagtctaatcttgccttaaatgttaagttattttttgaatatataaatataaacatataaacacagatgatgactggagtagacttttaaaaaaatatttttttcatgagatactattttaggtgaaattgttactgtagatttaacagctgttttgaaatatttactgttattaaaacttgcttcaagagaaattgtgaatatatttccatatacaagcactagtaacagtaagtggccctgtcatccactaactcaggcaaagtaaagaatggcatttttgaaggacattttacctccccatatgatttgattggctaggactttcttctgtaaagtcataccttttcacatcttaagtttttacatttgccattttccaaatctcaattttgggcaagaacgatatagtcacaactatggggctgctttcaaaagcggggctccatttctactgtcagatcaatgtggtgctgtaaccatctttttatccctaccttcaagaacctccttatatgaagcctgtctttatccatcagaaggtgtgtgaaatcatcacttccttctggttttatgtatttgtagactatgcagcttttcattaaactgcaagtatatacaagacagatctgaaattaggcctgagtgttccgatccaccactgtactagtaaataaaaatccacctaccttttatgtggaaaattatgtgctattgagtaacttttagctcttttttaaaaaatgggtgaaatttaagtgtcttttttatgagaatgacacatgaagagatctgagagcaatctcatgtagtcttccatgaacctgcaattgtttggtatgcgtcagcattttccaatttccaggttggatctagagctgctgttgatcactcaggcatactaatggattcatttagatgggtccaagctgcagtccatgagcaataacagactaccccagatactgcagtttacgcagtgcttagtaaatgagatttgtggaactaagttattagttacctgaggcttcttaagaaagtcttcttttttgaccagttgatgtgaaagagggagcatgtgacacagccagtatggtggagtgctagggttatcctgtttacaataaatcgcctgaatttcacctctggagtctgcatttgtattatttttccagttttagtgaaatagtacagtggccagtcctcagcctacctctcaacatcccagtttgaccagatttcttgctttcattgttcataatgcagaaagcagtgaattatattaacattttaaaagtgtttctgggtaacaatgatttttgtcaaatagaagactcaatttcacaaccttaagaatagatcacttttgtaaaacaagaatctcagtatttgatgttggactccttgctgtgagtattgtcactgactccaaacccagaaagatttgttcctgcccttacagggatgaaaataaaaaggatagaaaaaatatttctctcctctacaatgagtccttacatcttcttgccacatctccagctgcagtttaggcagatatcttgttcaatctctgtcttcttgatccctgtcaaaataatttttctactcatatagtggccagttggctcaggcaggcatttcaagaggaatctgcttgttcctcacttttccagcataggacagtggtccagcccgcacagtcagc

SEQ ID NO: 309 - DNA, 3277 bp, HOMO SAPIENS
gcgtgctgtgggcggtgccgcgcggacccccgggaagtgtctctgtgggcggccgccgggttgagctgcggcacacgtgcgacggccgtgatgaagttcgcttaccggttttcaaatttgctgggtacggtgtaccggcgtgggaacctaaattttacctgcgatggaaattcagttatcagtcccgtgggcaatagagtcactgtatttgaccttaaaaacaacaaatctgacacgctgcccctggccactcggtacaacgtcaagtgcgtggggctgtccccggatggccgcctcgctatcatcgtcgatgaagggggcgatgcgctgctggtcagcctggtctgcaggtctgtgctgcaccacttccacttcaagggctctgtgcacagtgtgtccttctcccctgatggcaggaagtttgttgtcacaaagggtaacattgcccagatgtatcatgcccctgggaagaagcgggagttcaacgccttcgttctggacaagacctattttgggccctacgatgagaccacctgcatcgactggacggatgactccaggtgctttgtggttgggagcaaagacatgtccacctgggtgttcggagccgagcgctgggacaacctcatctactatgcactggggggacataaggatgccatcgtggcctgcttctttgaatccaacagcctggacctgtactcactcagccaggacggagtgctgtgcatgtggcagtgtgacacgccccccgagggcttgcggctgaagccccctgcgggctggaaagcagacctgttgcagcgggaggaggaagaggaggaggaggaggaccaggagggcgacagagagaccaccatccggggaaaagccactccggccgaggaggagaagacaggaaaagtgaagtactcacggctggccaagtacttcttcaataaagaaggggattttaacaacctgacagctgcagcatttcataagaagtctcacctcttggtcactggctttgcttctggaatcttccatcttcatgagctgccagagtttaacctcatccactccctgagcatttcagatcagagcatcgcctcagtggccatcaatagctcgggggactggattgcttttggctgttcaggcctgggccagctgctggtgtgggagtggcagagtgagtcctacgtgctcaagcagcagggccacttcaacagcatggtggccctggcctactcgcccgacggacagtacatcgtgactggcggggacgacggcaaggtcaaggtgtggaacaccctcagcggcttctgcttcgtcacttttacggagcactccagcggggtgaccggtgtgacctttactgccaccggctacgttgtggtgacctcatccatggacgggaccgtgcgagcctttgaccttcacaggtaccgaaacttccgcaccttcacctctccacgccccacccagttctcctgtgtggcggtggatgcgagcggtgagatcgtctctgcaggggcgcaggactcctttgagattttcgtgtggtccatgcagacaggcaggctccttgatgttttgtctggacacgaagggcccatcagtggtctgtgttttaacccaatgaagtccgtcctggccagtgcctcctgggacaagacagtgcgcctatgggacatgtttgacagctggaggaccaaggagacgctggccctgacctctgatgctctggctgtgacttttcgccctgatggtgcggagctggctgtggccacactgaactcacagatcaccttctgggaccctgagaacgcggtgcagacgggctccattgagggcaggcatgacctcaagactggcaggaaggagctggacaagattacagccaagcacgcggccaaggggaaggccttcaccgccctgtgctactctgcagacggccacagcatcctggcgggaggcatgtccaagttcgtgtgcatctaccacgtccgtgagcagattctcatgaagaggttcgagatctcttgcaacctgtctttggacgccatggaggaatttttgaaccgaagaaaaatgacagagtttggcaacctggcactaattgatcaggatgctgggcaggaggatggagtcgcgataccactgccaggcgtcaggaaaggtgacatgagttctcggcacttcaaacctgagatcagggtgacctcactccgcttctctcccactgggcgctgctgggcggccaccaccacggagggactcctcatctactccctggacacccgcgtgctctttgacccgtttgagctggacaccagcgtcacccccgggagggtgcgcgaggcactgcgccagcaggacttcaccagggccatcctcatggccctccggctcaacgagagcaaactggtgcaggaggccctggaggcggtgcccaggggcgagattgaagtggtcacctcctcccttcctgaactgtatgtggagaaagtgctggagtttttagcttcctcctttgaagtgtctcgccacctggaattctacctcctctggactcacaaactgctcatgttgcacggacagaagctgaagtccagagccgggacgctgctgcctgtcattcagttcctccagaagagcatccagcggcacctggacgacctgtcgaaactctgtagctggaaccactataacatgcagtacgcactagcagtttccaagcagcggggcacaaaacgctccctagacccgctgggaagtgaggaggaggcagaagcatctgaagatgacagcctgcatctgcttggaggaggaggcagagactcagaagaagagatgctggcctagagccagccggttgcagcgttggattgtgccggctaagacctgccagggagatgggacccttgtgccacctgggccagcaaagaggaggggtccagagaacagctgaaatactgtcactagtggtagtgacttgcttttcctgtgcacacatgtagcccatcaggacagcgagccgacgggtcacgccaggggccggcacgcactggcacctggccccaggagcggggccgtgtgaacggtgatgaatgttgaaaatgcgtctcagagaggtattcacatgaactttgtatgagacttatttatatctttaacataaaggtttgataaagaacttagggattaaaaaaaagatggagttttctaacgtgaggatgaagtctacacttcagattaaaaagggttatgttgtaaaaaaaaaaaaaaaaaa

SEQ ID NO: 310 - DNA, 2525 bp, HOMO SAPIENS
gggaagtcggtgccgctgccgtctctgcgttcgccatgcgtcccggggcgccagggccactctggcctctgccctggggggccctggcttgggccgtgggcttcgtgagctccatgggctcggggaaccccgcgcccggtggtgtttgctggctccagcagggccaggaggccacctgcagcctggtgctccagactgatgtcacccgggccgagtgctgtgcctccggcaacattgacaccgcctggtccaacctcacccacccggggaacaagatcaacctcctcggcttcttgggccttgtccactgccttccctgcaaagattcgtgcgacggcgtggagtgcggcccgggcaaggcgtgccgcatgctggggggccgcccgcgctgcgagtgcgcgcccgactgctcggggctcccggcgcggctgcaggtctgcggctcagacggcgccacctaccgcgacgagtgcgagctgcgcgccgcgcgctgccgcggccacccggacctgagcgtcatgtaccggggccgctgccgcaagtcctgtgagcacgtggtgtgcccgcggccacagtcgtgcgtcgtggaccagacgggcagcgcccactgcgtggtgtgtcgagcggcgccctgccctgtgccctccagccccggccaggagctttgcggcaacaacaacgtcacctacatctcctcgtgccacatgcgccaggccacctgcttcctgggccgctccatcggcgtgcgccacgcgggcagctgcgcaggcacccctgaggagccgccaggtggtgagtctgcagaagaggaagagaacttcgtgtgagcctgcaggacaggcctgggcctggtgcccgaggccccccatcatcccctgttatttattgccacagcagagtctaatttatatgccacggacactccttagagcccggattcggaccacttggggatcccagaacctccctgacgatatcctggaaggactgaggaagggaggcctgggggccggctggtgggtgggatagacctgcgttccggacactgagcgcctgatttagggcccttctctaggatgccccagcccctaccctaagacctattgccggggaggattccacacttccgctcctttggggataaacctattaattattgctactatcaagagggctgggcattctctgctggtaattcctgaagaggcatgactgcttttctcagccccaagcctctagtctgggtgtgtacggagggtctagcctgggtgtgtacggagggtctagcctgggtgagtacggagggtctagcctgggtgagtacggagggtctagcctgggtgagtacggagggtctagcctgggtgtgtatggaggatctagcctgggtgagtatggagggtctagcctgggtgagtatggagggtctagcctgggtgtgtatggagggtctagcctgggtgagtatggagggtctagcctgggtgtgtatggagggtctagcctgggtgagtatggagggtctagcctgggtgtgtacggagggtctagtctgagtgcgtgtggggacctcagaacactgtgaccttagcccagcaagccaggcccttcatgaaggccaagaaggctgccaccattccctgccagcccaagaactccagcttccccactgcctctgtgtgcccctttgcgtcctgtgaaggccattgagaaatgcccagtgtgccccctgggaaagggcacggcctgtgctcctgacacgggctgtgcttggccacagaaccacccagcgtctcccctgctgctgtccacgtcagttcatgaggcaacgtcgcgtggtctcagacgtggagcagccagcggcagctcagagcagggcactgtgtccggcggagccaagtccactctgggggagctctggcggggaccacgggccactgctcacccactggccccgaggggggtgtagacgccaagactcacgcatgtgtgacatccggagtcctggagccgggtgtcccagtggcaccactaggtgcctgctgcctccacagtggggttcacacccagggctccttggtcccccacaacctgccccggccaggcctgcagacccagactccagccagacctgcctcacccaccaatgcagccggggctggcgacaccagccaggtgctggtcttgggccagttctcccacgacggctcaccctcccctccatctgcgttgatgctcagaatcgcctacctgtgcctgcgtgtaaaccacagcctcagaccagctatggggagaggacaacacggaggatatccagcttccccggtctggggtgaggaatgtggggagcttgggcatcctcctccagcctcctccagcccccaggcagtgccttacctgtggtgcccagaaaagtgcccctaggttggtgggtctacaggagcctcagccaggcagcccaccccaccctggggccctgcctcaccaaggaaataaagactcaagccatttaaaaaaaaaaaaaa

SEQ ID NO: 311 - DNA, 4745 bp, HOMO SAPIENS
acacatacatatgccactcacatccgacgtgtgtggttgctcagtagggaaatgcttacagctgcctctagaagcaagtccgctcgctgcatggagagggaaacatgagcatgcagcaggactagctgtcacctcccgcccgcctgcccagagagggccagagcgtcggggaggcaagatgatccaccagcggttccatcctacacttggattcagtaagctgtgaggtccgtaatgtcagacactggcaaacatcatatgttcttcaagtagagttatgaaaacgaagaaactggtcagaagagtaaaacgccggaattgtcctttccaacatccagagctgcatcattccttggggcaaaatgtggacaaggaatcttatggcaagggccttatatgacaatgtcccagagtgtgccgaggaactggcctttcgcaagggagacatcctgaccgtcatagagcagaacacagggggactggaaggatggtggctgtgctcattacacggtcggcaaggcattgtcccaggcaaccgggtgaagcttctgattggtcccatgcaggagactgcctccagtcacgagcagcctgcctctggactgatgcagcagacctttggccaacagaagctctatcaagtgccaaacccacaggctgctccccgagacaccatctaccaagtgccaccttcctaccaaaatcagggaatttaccaagtccccactggccacggcacccaagaacaagaggtatatcaggtgccaccatcagtgcagagaagcattgggggaaccagtgggccccacgtgggtaaaaaggtgataacccccgtgaggacaggccatggctacgtatacgagtacccatccagataccaaaaggacgtctatgatatccctccttctcataccactcaaggggtatacgacatccctccctcatcagcaaaaggccctgtgttttcagttccagtgggagagataaaacctcaaggggtgtatgacatcccgcctacaaaaggggtatatgccattccgccctctgcttgccgggatgaagcagggcttagggaaaaagactatgacttcccccctcccatgagacaagctggaaggccggacctcagaccggagggggtttatgacattcctccaacctgcaccaagccagcagggaaggaccttcatgtaaaatacaactgtgacattccaggagctgcagaaccggtggctcgaaggcaccagagcctgtccccgaatcacccacccccgcaactcggacagtcagtgggctctcagaacgacgcatatgatgtcccccgaggcgttcagtttcttgagccaccagcagaaaccagtgagaaagcaaacccccaggaaagggatggtgtttatgatgtccctctgcataacccgccagatgctaaaggctctcgggacttggtggatgggatcaaccgattgtctttctccagtacaggcagcacccggagtaacatgtccacgtcttccacctcctccaaggagtcctcactgtcagcctccccagctcaggacaaaaggctcttcctggatccagacacagctattgagagacttcagcggctccagcaggcccttgagatgggtgtctccagcctaatggcactggtcactaccgactggcggtgttacggatatatggaaagacacatcaatgaaatacgcacagcagtggacaaggtggagctgttcctgaaggagtacctccactttgtcaagggagctgttgcaaatgctgcctgcctcccggaactcatcctccacaacaagatgaagcgggagctgcaacgagttgaagactcccaccagatcctgagtcaaaccagccatgacttaaatgagtgcagctggtccctgaatatcttggccatcaacaagccccagaacaagtgtgacgatctggaccggtttgtgatggtggcaaagacggtgcccgatgacgccaagcagctcaccacaaccatcaacaccaacgcagaggccctcttcagacccggccctggcagcttgcatctgaagaatgggccggagagcatcatgaactcaacggagtacccacacggtggctcccagggacagctgctgcatcctggtgaccacaaggcccaggcccacaacaaggcactgcccccaggcctgagcaaggagcaggcccctgactgtagcagcagtgatggttctgagaggagctggatggatgactacgattacgtccacctacagggtaaggaggagtttgagaggcaacagaaagagctattggaaaaagagaatatcatgaaacagaacaagatgcagctggaacatcatcagctgagccagttccagctgttggaacaagagattacaaagcccgtggagaatgacatctcgaagtggaagccctctcagagcctacccaccacaaacagtggcgtgagtgctcaggatcggcagttgctgtgcttctactatgaccaatgtgagacccatttcatttcccttctcaacgccattgacgcactcttcagttgtgtcagctcagcccagcccccgcgaatcttcgtggcacacagcaagtttgtcatcctcagtgcacacaaactggtgttcattggagacacgctgacacggcaggtgactgcccaggacattcgcaacaaagtcatgaactccagcaaccagctctgcgagcagctcaagaccatagtcatggcaaccaagatggccgccctccattaccccagcaccacggccctgcaggaaatggtgcaccaagtgacagacctttctagaaatgcccagctgttcaagcgctctttgctggagatggcaacgttctgagaagaaaaaaaagaggaaggggactgcgttaacggttactaaggaaaactggaaatactgtctggtttttgtaaatgttatctatttttgtagatattttatataaaaatgaaatattttaacattttatgggtcagtcaactttcagaaattcagggagctggagagggaaatctttttttttccccctgagtggttcttatgtatacatagaagtatctgagacataaactgtacagaaaacttgtccacgtgcttttgtatgcccatgtattcatgtttgtttgtagatgtttgtctgatgcatttcattaaaaaaaaaaccatgaattacgaagcaccttagtaagcaccttctaatgctgcattttttttgttgttgttaaaaacataccagctggttataatattgttctccacgtccttgtgatgattctgagcctggcactcccaaatctgggaagcatagtttatttgcaagtgttcaccttccaaatcatgaggcatagcatgacttattcttgtttggaaaactcttttcaaaactgaccatcttaaacacatgatggccaagtgcccaaaagccctcttgcggagcaaatttcagaatatatatgtggatccaagctctgatagttcaggtgctggagggaagagagacctgtgtgtttagaggccaggaccacagttaggattgggttgtttcaatactgagagacagctacaataaaaggagagcaattgcctccctggggctgttcaatcttctgcatttgtgagtggttcagtcatgaggttttccaaaagatgtttttagagttgtaaaaaccatatttgcagcaaagatttacaaaggcgtatcagactatgattgttcaccaaaataggggaatggtttgatccgccagttgcaagtagaggcctttctgactcttaatattcactttggtgctactacccccattacctgagggaaactggccaggtccttgatcatggaactatagagctaccaggacatatcctgctctctaagggaatttattgctatcttgcaccttctttaaaactcacatatgcagacctgacactcaagagtggctagctacacagagtccatctaatttttgcaacttcctgtggccagtgtgtataaccccttccactatctcacagatagtcacagcgtccattccatagtctgtctcctcacatctgttagtattgacacagcacagacaccacaagccatcaggttcttcatggggcaggtgaaatacttctaccccatgggtaaatgtattcacatattaccaagagaagaagcacattatctatgatcttttggcccagttcttatttagcatttttattccagcctacttggaaacatgtttttatttgcaatatatgcctgactgaattaagcttgcttgttttaaacaaccaaatcattggaacagaaaaggatttaaaaaacaagaatgcatgatctcagagtgattaaaaaaaaatcagtggaaataaatgatcatagaaggtgcttttcaaaacaactgctattataattctcaaagtcctactctgccaaaagaagattaaaagtcatacattacattacaaggaaatgttcatgtgggaagagggttgctgaaaatcaacaacgcttgaagttaaaaagtgtgtctttgtagatttcattgtataatgtgtatttcttaggagatggctgacttgattgatctacgctaagtggagacatttcacatttttaaaaccaaatgttcaatctgtattactctttgccgtcttgtatgtagaggctatttttaaatcattaaatttttagatctctgttttcataaaaaaaaaaaaaaa

SEQ ID NO: 312 - DNA, 794 bp, HOMO SAPIENS
aagtgcccgagggcggccgcagaacggtcaatttgagccgcgtcgagctcccctgggacctgtggccgccgcccacagaccatgctcctggggcgcctgacttcccagctgttgagggccgttccttgggcaggcggccgcccgccttggcccgtctctggagtgctgggcagccgggtctgcgggcccctttacagcacatcgccggccggcccaggtagggcggcctctctccctcgcaagggggcccagctggagctggaggagatgctggtccccaggaagatgtccgtcagccccctggagagctggctcacggcccgctgcttcctgcccagactggataccgggaccgcagggactgtggctccaccgcaatcctaccagtgtccgcccagccagataggggaaggggccgagcagggggatgaaggcgtcgcggatgcgcctcaaattcagtgcaaaaacgtgctgaagatccgccggcggaagatgaaccaccacaagtaccggaagctggtgaagaagacgcggttcctgcggaggaaggtccaggagggacgcctgagacgcaagcagatcaagttcgagaaagacctgaggcgcatctggctgaaggcggggctaaaggaagcccccgaaggctggcagacccccaagatctacctgcggggcaaatgagtctggcgccgcccttcccgcccgttgctgctgtgatccgtagtaataaattctcagaggactcagcctttaaaaaaaaaaaaaaaaaaaaaaaaaaaaaaaaaaaaaaaaaa

SEQ ID NO: 313 - DNA, 1848 bp, HOMO SAPIENS
ggcttccgtccattcttccggtggagatggctgcggccgtggcggggatgctgcgagggggtctcctgccccaggcgggctagagtgcagtggcatgatctcggctcactgcaacctccacctcccgggttcaagcgattctcctgcctcagcctctcaagtagctgggattacaggccggctgcctaccctccagactgtccgctatggctccaaggctgttacccgccaccgtcgtgtgatgcactttcagcggcagaagctgatggctgtgactgaatatatccccccgaaaccagccatccacccatcatgcctgccatctcctcccagccccccacaggaggagataggcctcatcaggcttctccgccgggagatagcagcagttttccaggacaaccgaatgatagccgtctgccagaatgtggctctgagtgcagaggacaagcttcttatgcgacaccagctgcggaaacacaagatcctgatgaaggtcttccccaaccaggtcctgaagcccttcctggaggattccaagtaccaaaatctgctgcccctttttgtggggcacaacatgctgctggtcagtgaagagcccaaggtcaaggagatggtacggatcttaaggactgtgccattcctgccgctgctaggtggctgcattgatgacaccatcctcagcaggcagggctttatcaactactccaagctccccagcctgcccctggtgcagggggagcttgtaggaggcctcacctgcctcacagcccagacccactccctgctccagcaccagcccctccagctgaccaccctgttggaccagtacatcagagagcaacgcgagaaggattctgtcatgtcggccaatgggaagccagatcctgacactgttccggactcgtagccagcctgtttagccagccctgcgcataaatacactctgcgttattggctgtgctctcctcaatgggacatgtggaagaacttggggtcggggagtgtgtttgtcacttggttttcactagtaatgatattgtcaggtatagggccacttggagatgcagaggattccatttcagatgtcagtcaccggcttcgtccttagttttcccaacttgggacgtgataggagcaaagtctctccattctccaggtccaaggcagagatcctgaaaagatagggctattgtcccctgcctccttggtcactgcctcttgctgcacgggctcctgagcccacccccttggggcacaacctgccactgccacagtagctcaaccaagcagttgtgctgagaatggcacctggtgagagcctgctgtgtgccaggctttgtgctgagtgctgtacatgtattagttcctttactgctgaccacattgtacccatttcacagagaaggagcagagaaattaagtggcttgctcaaggtcatgcagttagtaagtggcagaacagggacttgaaccaagccctctgctctgaagaccgcgtcctgaatttcttcactagagcttcctcatcaggttacccagaagtgggtcccatccaccatccaggtgtgcttggatgttagttctccaccctcgaggtgtacgctgtgaaaagtttgggagcactgctttataataaaatgaaatatattctacttcctttattttgtggtttacacggttgtcctccctctaaacttactctcaggggcttctctgtcatctgactttcctcactcttgcttcccttcctaggaaaatcctcttcccctatacctgttcccacaaatggcatcccgcgcatgcttgccctattaaaggcagctgacagctgtacccactagctaa

SEQ ID NO: 314 - DNA, 1367 bp, HOMO SAPIENS
aaacctggggaggaagacatagaaaagcaactgctctatcattggctgacaagatcctgacaacaacacaatgagagctgcactccttgcaagtctttactagtagctgttgcttctgttctctggaaattctttaaacctagaatcagacacaaaaactgaactctgggtccacaatcctcatttgtccttgaagtatgaggctggtggcaagagtaactgtgtttctgacctttggaactataattgatgctaagaccacccagcccccctccatggattgcgctgaaggaagagctgcaaacctgccttgtaatcactctaccatcagtggaaatgagtatgtgtattggtatcgacagattcactcccaggggccacagtatatcattcatggtctaaaaaacaatgaaaccaatgaaatggcctctctgatcatcacagaagacagaaagtccagcaccttgatcctgccccacgctacgctgagagacactgctgtgtactattgcatcgtcagagataataatgcaggcaacatgctcacctttggagggggaacaaggttaatggtcaaaccccatatccagaaccctgaccctgccgtgtaccagctgagagactctaaatccagtgacaagtctgtctgcctattcaccgattttgattctcaaacaaatgtgtcacaaagtaaggattctgatgtgtatatcacagacaaaactgtgctagacatgaggtctatggacttcaagagcaacagtgctgtggcctggagcaacaaatctgactttgcatgtgcaaacgccttcaacaacagcattattccagaagacaccttcttccccagcccagaaagttcctgtgatgtcaagctggtcgagaaaagctttgaaacagatacgaacctaaactttcaaaacctgtcagtgattgggttccgaatcctcctcctgaaagtggccgggtttaatctgctcatgacgctgcggctgtggtccagctgagatctgcaagattgtaagacagcctgtgctccctcgctccttcctctgcattgcccctcttctccctctccaaacagagggaactctcctgctccccagagactgcctccgccatcccacagatgatggatcttcagtgggttctcttgggctctaggtcctgcagaatgttgtgaggggtttatttttttttaatagtgttcataaagaaatacatagtattcttcttctcaagacgtggggggaaattatctcattatcgaggccctgctatgctgtgtatctgggcgtgttgtatgtcctgctgccgatgccttcattaaaatgatttggaagagcagaaaaaaaaaaaaaaaaaaa

SEQ ID NO: 315 - DNA, 1060 bp, HOMO SAPIENS
cagctacccaagctccaggagcttccggtatgtgttttccctctgttctcgattaccttggcaacggctgaggcgggagaccggtggtctgcaccgtcctggagggagatatgagtggctggactctcagccagccactgggatgtgttcgggctttggaccttgaggccggagagagctcccgagaggaggcggcgccacgttcgttcttctgaggggacggtagatttgggggttttcctctaggattctcgcgccgtttcctctgaagaaacaggaccagagagggaaggtgacctgaaagtcacagaataattttttagagctgaacaagaatccaagcctgcaactgcagagacgagagatctttctgctgtctatactcttggaaagcacatcctaagatctttgcagattatcctgtggaaggaaaatgcctaaagtcaaaagaagccggaaagcacccccagatggctgggagttgattgagccaacactggatgaattagatcaaaagatgagagaagctgaaacagaaccgcatgagggaaagaggaaagtggaatctctgtggcccatcttcaggatccaccaccagaaaacccgctacatcttcgacctcttttacaagcggaaagccatcagcagagaactctatgaatattgtattaaagaaggctatgcagacaaaaacctgattgcaaaatggaaaaagcaaggatatgagaacttgtgctgcctgcggtgcattcagacacgggacaccaacttcgggacgaactgcatctgccgcgtgcccaaaagcaagctggaagtgggccgcatcatcgagtgcacacactgtggctgtcgtggctgctctggctgaggctggcgcgctccaccctggactctggacttcgcaggttcctgcctgtcacgccacccccttcctgggagcagcgagcagtgccccaggcccgagttggagcacggtctctatggggaaggcttcgctgtctatcagctgtgatttgtaaaaataaaatctttaaatctctcgaaaaaaaaaaaaaaaaaa

SEQ ID NO: 316 - DNA, 3277 bp, HOMO SAPIENS
gcgtgcacgctgacgccgcgcagtctcgtcccctgccgccgccgtcgccgctgctgtcgccgccgccgccgccattggagtcgacgcctcctcagtgcgtccgcgtcccgggctcaccgccgctgccgcctcgccaggggcccgcgcgcccagcagccgccgccgccgcccggccggcgcccggggaattggcggcggggcccggggccgcgcgagctagggtgacaggcccggcctctaggggaggcccgagccggcgggcgccccggccccgcgtctagttgttcatgaagcatgtcggccaccagcgtggacacccagagaacaaaaggacaagataataaagtacaaaatggttcgttacatcagaaggatacagttcatgacaatgactttgagccctaccttactggacagtcaaatcagagtaacagttacccctcaatgagcgacccctacctgtccagctattacccgccgtccattggatttccttactccctcaatgaggctccgtggtctactgcaggggaccctccgattccatacctcaccacctacggacagctcagtaacggagaccatcattttatgcacgatgctgtttttgggcagcctgggggcctggggaacaacatctatcagcacaggttcaattttttccctgaaaaccctgcgttctcagcatgggggacaagtgggtctcaaggtcagcagacccagagctccgcgtatgggagcagctacacctaccccccgagctccctgggtggcacggtggttgatgggcagccaggctttcacagcgacaccctcagcaaggcccccgggatgaacagcctggagcagggcatggttggcctgaagattggggacgtcagctcctccgccgtcaagacggtgggctctgtcgtcagcagcgtggcactgactggtgtcctttctggcaacggtgggacaaatgtgaacatgccagtttcaaagccgacctcgtgggctgccattgccagcaagcctgcaaaaccacagcctaaaatgaaaacaaagagcgggcctgtcatggggggtgggctgccccctccacccataaagcataacatggacattggcacctgggataacaaggggcctgtgccgaaggccccagtcccccagcaggcaccctctccacaggctgccccacagccccagcaggtggctcagcctctcccagcacagcccccagctttggctcaaccgcagtatcagagccctcagcagccaccccagacccgctgggttgccccacgcaacagaaacgcggcgtttgggcagagcggaggggctggcagcgatagcaactctcctggaaacgtccagcctaattctgcccccagcgtcgaatcccaccccgtccttgaaaaactgaaggctgctcacagctacaacccgaaagagtttgagtggaatctgaaaagcgggcgtgtgttcatcatcaagagctactctgaggacgacatccaccgctccattaagtactccatctggtgtagcacagagcacggcaacaagcgcctggacagcgccttccgctgcatgagcagcaaggggcccgtctacctgctcttcagcgtcaatgggagtgggcatttttgtggggtggccgagatgaagtcccccgtggactacggcaccagtgccggggtctggtctcaggacaagtggaaggggaagtttgatgtccagtggatttttgttaaggatgtacccaataaccagctccggcacatcaggctggagaataacgacaacaaaccggtcacaaactcccgggacacccaggaggtgcccttagaaaaagccaagcaagtgctgaaaattatcagttcctacaagcacacaacctccatcttcgacgactttgctcactacgagaagcgccaggaggaggaggaggtggtgcgcaaggaacggcagagtcgaaacaaacaatgagggcgaaccagtttcttacatgttctaacgtttgactttgaaaacagtttaaaacacgtgtgcttggtcagctccagtgtgtcgtcccgtgcgggggttgagtgttgcatctttgcctttcttgtcgttgatttttgcccagatggatctgcatttatttgtactttttctatgtattataatcctgtagaagtcactaataaaggagtattttttttgtcagcttatcaatcagactgatctaatgtgaaatgtaagtatccttaaaaacaaagcatctattttggcagaaattgtgttcttaaattcagtcatttgatattctgtgagacttcatatttctcatccctttattgctttttagcaaacataagaaaccatgagtcattttgtcatttagagtattctgataaaatctcttgaaaatactgaaatcaaaaggttaatgattttttgttcattctgatttgtcattttattatctgttatcggtctaaagtgctaatttacccatttgatttttctgctagacagataacttttaatttttcaaatttggcagacactttttttttttttttgaaaatctttccttccagatctgttgcccactgaacagccacccgtccctcactgtcctggtgtccgattgggctggatggtgttggggcatgatgtgtggaggaactggaaggtgctttaggtctggttcagggtcgggcattctttgttgtttgcacatctttttaaattttacaccttttcttaagaattctaatgccgtcttaagtttttataccaataatgctgagctttaagtgtaggatctggtagtacagacagtgtgatggatgatgctgctggttgtaaatttcatcgtgtgtgtctaattttttttcctgttgaatgggtaaaaacaaaacaaaactttttttagaagatgaatttgctgtcatgttttgtggaatgagggaccgttgagctcactaccacctggagtttgagttgaagcatgaaaatggtgcccatgcctgacgctccagcgcctggatctgcacgtgcccttgtagaggatccttaccgtcctagagagcagacgctttctgaaaactacttgctccaaaagaccctctgagttaacgtttcagctgtatcattagacttgtatttagagcgtgtcacttcctctgaactgttactgcctgaatggagtcctggacgacattgggtttttcctctaggagaatacaagccttaataaacaatactatttagcaaaaaaaaaaaaaaaaaaaaaaaaaaa

SEQ ID NO: 317 - DNA, 2433 bp, HOMO SAPIENS
atttcacttggaggaaagagagaaggaaggaagctgaggacttagcagggtatcactggacaggccatggctccacggtcccggcgacgaaggcacaagaaacctccctcatcagtggctcccatcatcatggccccaaccacaattgtgacccctgtgcctctgaccccctcaaaacctggccctagcattgacacacttggcttcttctccttggatgataatgttcctggcctatcgcagctgatccttcaaaagctgaacatgaaaagctatgaagaatataagttggtggtagatgggggtacccccgtatcaggctttggatttcgatgtcctcaagaaatgttccagaggatggaagacacatttcgattctgtgctcactgtagagcactccctagtgggctttcagactccaaggttctccggcactgtaagaggtgcagaaatgtctattactgtggtccagagtgccagaagtcagactggcccgcacacaggagggtttgtcaagagcttcgtcttgtggctgtggaccgtctcatggaatggcttctggtcacaggtgattttgttctaccctcaggaccttggccatggccacctgaagctgtacaggactgggactcctggttttctatgaaggggttacacctagatgctacattggatgctgtgctagttagtcatgctgtgaccaccttatgggccagtgtaggacggccaaggccagacccggatgtcctgcagggatctttgaagcggctgctgacagatgtcctgtcacggcccttgactctaggcctaggacttagggccttggggatagatgttaggaggactgggggaagcacagtgcatgtggttggtgcttcccatgtggagacatttcttactcgcccaggggactatgatgagcttggttacatgtttcctgggcaccttggactccgtgtggtcatggtgggtgtagatgtagctactggcttttcacagagcacctcaacttcacccctggaacctggcacaattcagcttagtgcccacaggggcctctaccatgacttctgggaggagcaagtagagaccgggcagacacaccatccagatttggtggcggcattccatccaggttttcattcctccccagacttgatggaggcttggctgcccaccctgctgctacttcgtgactataagattcctacattgattactgtttacagccatcaggagttggtatcctctttgcagattctggtggaactggatacacacatcactgcctttgggtctaatcctttcatgtccctcaaacctgaacaggtctattccagtcccaacaagcagccagtatactgcagtgcatactatatcatgtttcttggaagctcctgtcagctggataataggcaattagaagagaaagtggacggcgggatttaaatagatcataactggacatctggaaaacggggagtttgtgatgaaattaccctgctaatgccaggttcttgcaaactttgaaaaacattatattctaaacctcatttactgtttgggtaaaaattctaagctgaatgagagtttctgtataacataactggtttctttctttttttgagatggagtcttgctctgttgcccaggctggagtgcagcggcatgatctcgactcactgcagcctccgcctcctgggttcaagtggttctcctgcctcagcctccctagtagctgggattacaggtgcacaccaccacacctggctaatttttgtatttttagcagacagggtttcaccatgttggccaggctcgtatcaaacccttgaccccaggtgatctgcctgcctcagcctcccaaagttctgggattacaggcatgagccaccatgcccagccaatgtaactggtttctaagagtttagccacagtagcttctagagataggaaattagatttagtgggtgggaagaggccctgatgctggtctttccagagcttatagttgctaacacttttctttgtaaagaagtttaccttttgactggaaccagatggcactgagaaaaagaatgagaaccaccttattcttctgaaaaagactttcttctcatccagtaatttgggctaaaaaatggaaagatgttgatgacttgaagtgatgcaagaatggacaagtcagggaagtcattgggaacatggatgaggttgtaagcattggtacagtgtcctgtttcctgacttttttgagagaaatgtctacttttcctgttttctcttggggacttttgaccctagagtagccctggtgttatattttagatatcccaagctatatcagactttacctgaatatactggagttacttattatcccccattctataccccaataaactcagtttggggcttcttaaaaaaaaaaaa

SEQ ID NO: 318 - DNA, 1550 bp, HOMO SAPIENS
gcggagcggagcggcggcgggcgcagctagcgggtcggccgcggagcggaggtgcagctcggcttcccccggcacccctccccctcgggcgccagccccacccctccgccggccgggccgaccccgccgtactatcccctgcggcgcgagcccggggcggctccaagcgccccccagcagacccccatcatgggcagccagagctccaaggctccccggggcgacgtgaccgccgaggaggcagcaggcgcttcccccgcgaaggccaacggccaggagaatggccacgtgaaaagcaatggagacttatcccccaagggtgaaggggagtcgccccctgtgaacggaacagatgaggcagccggggccactggcgatgccatcgagccagcaccccctagccagggtgctgaggccaagggggaggtcccccccaaggagacccccaagaagaagaagaaattctctttcaagaagcctttcaaattgagcggcctgtccttcaagagaaatcggaaggagggtgggggtgattcttctgcctcctcacccacagaggaagagcaggagcagggggagatcggtgcctgcagcgacgagggcactgctcaggaagggaaggccgcagccacccctgagagccaggaaccccaggccaagggggcagaggctagtgcagcctcagaagaagaggcagggccccaggctacagagccatccactccctcggggccggagagtggccctacaccagccagcgctgagcagaatgagtagctaggtaggggcaggtgggtgatctctaagctgcaaaaactgtgctgtccttgtgaggtcactgcctggacctggtgccctggctgccttcctgtgcccagaaaggaaggggctattgcctcctcccagccacgttccctttcctcctctccctcctgtggattctcccatcagccatctggttctcctcttaaggccagttgaagatggtcccttacagcttcccaagttaggttagtgatgtgaaatgctcctgtccctggccctacctccttccctgtccccacccctgcataaggcagttgttggttttcttccccaattcttttccaagtaggttttgtttaccctactccccaaatccctgagccagaagtggggtgcttatactcccaaaccttgagtgtccagccttcccctgttgtttttagtctcttgtgctgtgcctagtggcacctgggctggggaggacactgccccgtctaggtttttataaatgtcttactcaagttcaaacctccagcctgtgaatcaactgtgtctcttttttgacttggtaagcaagtattaggctttggggtggggggaggtctgtaatgtgaaacaacttcttgtcttttttttctcccactgttgtaaataacttttaatggccaaaccccagatttgtacttttttttttttctaactgctaaaaccattctcttccacctggttttactgtaacatttggaaaaggaataaatgtcgtccctttaaaaaaaaaaaaaaaa

SEQ ID NO: 319 - DNA, 1973 bp, HOMO SAPIENS
gcgcaggcggggcgcaggcgcgggcgcgctctcccggcagcccgcgctccctgaccccgcgccgccgagcgccctgaggactcagcgaagggtgggcgccgccgaggcctcctgccgctggcgggtttccgcggagtgccgcccggctccgctctgccgccggcgcggctcatgggcagagtcggccgggcgggccggcattaaactgaagaaaagatgtccctgtacgatgacctaggagtggagaccagtgactcaaaaacagaaggctggtccaaaaacttcaaacttctgcagtctcagcttcaggtgaagaaggcagctctcactcaggcaaagagccaaaggacgaaacaaagtacagtcctcgccccagtcattgacctgaagcgaggtggctcctcagatgaccggcaaattgtggacactccaccgcatgtagcagctgggctgaaggatcctgttcccagtgggttttctgcaggggaagttctgattcccttagctgacgaatatgaccctatgtttcctaatgattatgagaaagtagtgaagcgccaaagagaggaacgacagagacagcgggagctggaaagacaaaaggaaatagaagaaagggaaaaaaggcgtaaagacagacatgaagcaagtgggtttgcaaggagaccagatccagattctgatgaagatgaagattatgagcgagagaggaggaaaagaagtatgggcggagctgccattgccccacccacttctctggtagagaaagacaaagagttaccccgagattttccttatgaagaggactcaagacctcgatcacagtcttccaaagcagccattcctcccccagtgtacgaggaacaagacagaccgagatctccaaccggacctagcaactccttcctcgctaacatggggggcacggtggcgcacaagatcatgcagaagtacggcttccgggagggccagggtctggggaagcatgagcagggcctgagcactgccttgtcagtggagaagaccagcaagcgtggcggcaagatcatcgtgggcgacgccacagagaaagatgcatccaagaagtcagattcaaatccgctgactgaaatacttaagtgtcctactaaagtggtcttactaaggaacatggttggtgcgggagaggtggatgaagacttggaagttgaaaccaaggaagaatgtgaaaaatatggcaaagttggaaaatgtgtgatatttgaaattcctggtgcccctgatgatgaagcagtacggatatttttagaatttgagagagttgaatcagcaattaaagcggttgttgacttgaatgggaggtattttggtggacgggtggtaaaagcatgtttctacaatttggacaaattcagggtcttggatttggcagaacaagtttgattttaagaactagagcacgagtcatctccggtgatccttaaatgaactgcaggctgagaaaagaaggaaaaaggtcacagcctccatggctgttgcataccaagactcttggaaggacttctaagatatatgttgattgatcccttttttattttgtggttttttaatatagtataaaaatccttttaaaaaaacaacaatctgtgtgcctctctggttgtttctcttttttattattactcctgagttgatgacattttttgttagatttcatggtaattctcaagtgcttcaatgatgcagcatttcttgcactaaaaaaaaaaaaaaaaaactagaaagttttgggacatggggttatattaaattattctttgtttttctttttcttttaataaagcctgcaagttactaaattgtagtttcataaattctgtagtaaagtatcatcttggcagtgtgccaaaggtgaaaatgatgctttctctaacagagaaattcttagtgactccagtcgtagaaaaacgtctttacaacctgaataagattga

SEQ ID NO: 320 - DNA, 2104 bp, HOMO SAPIENS
acgtagcgcggcgctcggaactgacctactaacacacatctctccgcgcggccacggcgcccgcggacccggcgcgcccgcccgcctcccgcgccgcgccctcgccgccgcccgcctcccgccgcggccccggaggcccggcccggcccgagccccgagcgccggcggcccgactcccggccgcccctttctttctcctcgccggcccgagagcaggaacacgataacgaaggaggcccaacttcattcaataaggagcctgacggatttatcccagacggtagaacaaaaggaagaatattgatggattttaaaccagagtttttaaagagcttgagaatacggggaaattaatttgttctcctacacacatagatagggtaaggttgtttctgatgcagctgagaaaaatgcagaccgtcaaaaaggagcaggcgtctcttgatgccagtagcaatgtggacaagatgatggtccttaattctgctttaacggaagtgtcagaagactccacaacaggtgaggagctgcttctcagtgaaggaagtgtggggaagaacaaatcttctgcatgtcggaggaaacgggaattcattcctgatgaaaagaaagatgctatgtattgggaaaaaaggcggaaaaataatgaagctgccaaaagatctcgtgagaagcgtcgactgaatgacctggttttagagaacaaactaattgcactgggagaagaaaacgccactttaaaagctgagctgctttcactaaaattaaagtttggtttaattagctccacagcatatgctcaagagattcagaaactcagtaattctacagctgtgtactttcaagattaccagacttccaaatccaatgtgagttcatttgtggacgagcacgaaccctcgatggtgtcaagtagttgtatttctgtcattaaacactctccacaaagctcgctgtccgatgtttcagaagtgtcctcagtagaacacacgcaggagagctctgtgcagggaagctgcagaagtcctgaaaacaagttccagattatcaagcaagagccgatggaattagagagctacacaagggagccaagagatgaccgaggctcttacacagcgtccatctatcaaaactatatggggaattctttctctgggtactcacactctcccccactactgcaagtcaaccgatcctccagcaactccccgagaacgtcggaaactgatgatggtgtggtaggaaagtcatctgatggagaagacgagcaacaggtccccaagggccccatccattctccagttgaactcaagcatgtgcatgcaactgtggttaaagttccagaagtgaattcctctgccttgccacacaagctccggatcaaagccaaagccatgcagatcaaagtagaagcctttgataatgaatttgaggccacgcaaaaactttcctcacctattgacatgacatctaaaagacatttcgaactcgaaaagcatagtgccccaagtatggtacattcttctcttactcctttctcagtgcaagtgactaacattcaagattggtctctcaaatcggagcactggcatcaaaaagaactgagtggcaaaactcagaatagtttcaaaactggagttgttgaaatgaaagacagtggctacaaagtttctgacccagagaacttgtatttgaagcaggggatagcaaacttatctgcagaggttgtctcactcaagagacttatagccacacaaccaatctctgcttcagactctgggtaaattactactgagtaagagctgggcatttagaaagatgtcatttgcaatagagcagtccattttgtattatgctgaattttcactggacctgtgatgtcatttcactgtgatgtgcacatgttgtctgtttggtgtctttttgtgcacagattatgatgaagattagattgtgttatcactctgcctgtgtatagtcagatagtccatgcgaaggctgtatatattgaacattatttttgttgttctattataaagtgtgtaagttaccagtttcaataaaggattggtgacaaacacagaaaaaaaaaaaaaaaaaaaaa

SEQ ID NO: 321 - DNA, 3498 bp, HOMO SAPIENS
tgcgcagtggggagcagctcgctcctgggctttgggctggctgcagtctgtctgagggcggccgaagtggctggctcatttaagatgaggcttctgctgcttctcctagtggcggcgtctgcgatggtccggagcgaggcctcggccaatctgggcggcgtgcccagcaagagattaaagatgcagtacgccacggggccgctgctcaagttccagatttgtgtttcctgaggttataggcgggtgtttgaggagtacatgcgggttattagccagcggtacccagacatccgcattgaaggagagaattacctccctcaaccaatatatagacacatagcatctttcctgtcagtcttcaaactagtattaataggcttaataattgttggcaaggatccttttgctttctttggcatgcaagctcctagcatctggcagtggggccaagaaaataaggtttatgcatgtatgatggttttcttcttgagcaacatgattgagaaccagtgtatgtcaacaggtgcatttgagataactttaaatgatgtacctgtgtggtctaagctggaatctggtcaccttccatccatgcaacaacttgttcaaattcttgacaatgaaatgaagctcaatgtgcatatggattcaatcccacaccatcgatcatagcaccacctatcagcactgaaaactcttttgcattaagggatcattgcaagagcagcgtgactgacattatgaaggcctgtactgaagacagcaagctgttagtacagaccagatgctttcttggcaggctcgttgtacctcttggaaaacctcaatgcaagatagtgtttcagtgctggcatattttggaattctgcacattcatggagtgcaataatactgtatagctttccccacctcccacaaaatcacccagttaatgtgtgtgtgtgttttttttttaaggtaaacattactacttgtaactttttttcttagtcatatttgaaaaagtagaaaattgagttacaatttgattttttttccaaagatgtctgttaaatctgttgtgcttttatatgaatatttgttttttatagtttaaaattgatcctttgggaatccagttgaagttcccaaatactttataagagtttatcagacatctctaatttggccatgtccagtttatacagtttacaaaatatagcagatgcaagattatgggggaaatcctatattcagagtactctataaatttttgtgtatgtgtgtatgtgcgtgtgattaccagagaactactaaaaaaaccaactgctttttaaatcctattgtgtagttaaagtgtcatgccttgaccaatctaatgaattgattaattaactgggcctttatacttaactaaataaaaaactaagcagatatgagttaaatttaaaagtttcaatttattgctcagtgtacctgttaacattatatttaacaattgcttaaatttttgtttttgatttatggataatttcttaagagtacacactttagatacacaaataatcgttcatttaccatctttaggatcattgaaactcatctcactaaagaaagttcacttgaacctctttatagcattgatactaggtgaacagaaattacctgactaataatttgtctaacatcatatatcagaattttattgtatatgatgaacaaaacttaaaattttttaaatttaatttttaaatactgtttcagagttctaaaaaggcagttttttaaaaaacttaagttgataaaaactgtaagaataatttagcagaaatagaaccagaatgtagaagagtagtcatgtaacagcagtaataacatacttcagcttccatataggaatagaagtggtagagccaaaagtgatttaggaaaagttataaggtacaggttgagtatcccttttccaaaaatgcttgggacaagaagtatttcagatttcataatttttttcaaagtttggaatatttgcattatacttaccagttgggcatcccaaatctgaaatctgaaatgttccatgagcatttcctttgagtgtcatgttggcactcaaaaaggttcaacattgagtccacttaacacttaggtgttagaagacctaactttctgtaacaattaaccttatactttgtttgtcatcgaatatttgttgaatgcatgtcaggtaatggtcttgattgtgatagcttcaaggtggaacatactgtaatctccagatgctaggaagttagtctaataattcactgcagaaaattgattaagtggctgtccttttaattaagagtgtggagtcataaacttaagttcttcatatagtgacaagagtccttagagattgttattcaagttccttagaaattgttatttaggtataatatcatcttgtctttgactagagcttgaaaccttgttatctgattgtgtaccactccaaattccctgccttctgcaagttgaatgtcttgctgaatgtgtctaggggttcatcttcagtaatcgacattccactagtgccatagttaacttcatgacatgtagacattcaaaacttgagccttggatgttcctgtggacctgacagttaaaaatataaagaacctaggattcaattccaactttctctgtttgccttgggttgaataacttatcttttggagaatagctttaagtggcttagacactgataaaattcagctgtgttgttgacgctcatctcttttgtcttacgcttagccatatttaaatcttgaatttaatagagtctagtgaaaaaaatgagtgggaagaatgaatataaaagtaataatataaggaaaaagggaaagtaaactatttagaatgtagttttgttatattcccagcatttcaatatttattagttacttgtaaattactgtggctgtgtagtttataaatgtctgtgcactatattaattagaagaccatagaacatgccagcaggttggctaatgctatgggggtttttaccacagttgccattgtggaagaaattatttggtacattaataaaaaaagttggtaaaacatggttttatacctcagtgtataagatgtgcaagacaaatatgcttatttccttttctagaatataagtgatattatttgcttatgacactaacactattaatgacaggagtcaatcagcctttacagctatcaaaatataatgagatcccaatgatgattcttttttactttgaatgttaattagtttgggactttgattggctggcaaacattttatcattgtcagaatttaatttagatttcaaaaatagcttacaggattttaaacatggtgtggtattctaaagccttttttttaaaaaaagagatctttttgagagaaacaaatgaggattgtaaagtttggggacttacctctgtagcattgtgaaaataaactttgattaagctgatttgaaaggaaaaaaaaaa

SEQ ID NO: 322 - DNA, 678 bp, HOMO SAPIENS
ctcgcccaaagaagactacaatctccagggaaacctggggcgtctcgcgcaaacgtccataactgaaagtagctaaggcaccccagccggaggaagtgagctctcctggggcgtggttgttcgtgatccttgcatctgttacttagggtcaaggcttgggtcttgccccgcagacccttgggacgacccggccccagcgcagctatgaacctggagcgagtgtccaatgaggagaaattgaacctgtgccggaagtactacctgggggggtttgctttcctgccttttctctggttggtcaacatcttctggttcttccgagaggccttccttgtcccagcctacacagaacagagccaaatcaaaggctatgtctggcgctcagctgtgggcttcctcttctgggtgatagtgctcacctcctggatcaccatcttccagatctaccggccccgctggggtgcccttggggactacctctccttcaccatacccctgggcaccccctgacaacttctgcacatactggggccctgcttattctcccaggacaggctccttaaagcagaggagcctgtcctgggagccccttctcaaactcctaagacttgttttcatgtcccacgttctctgctgacatcccccaataaaggaccctaactttcaaaaaaaaaaaaa

SEQ ID NO: 323 - DNA, 1038 bp, HOMO SAPIENS
gtccgggtgacgtctcccgagggcgtcggcagggtcggcggcgtcggcagcagtgtcgacggcagcggcggcggcgggtgggaaatggcggagtatctggcctccatcttcggcaccgagaaagacaaagtcaactgttcattttatttcaaaattggagcatgtcgtcatggagacaggtgctctcggttgcacaataaaccgacgtttagccagaccatcttgattcaaaacatctatcgtaatccccaaaacagtgcacagacggctgacggctcacactaccattgccctcttgaacatttaccgtaaccctcaaaactcttcccagtctgctgacggtttgcgctgtgccgtgagcgatgtggagatgcaggaacactatgatgagttttttgaggaggtttttacagaaatggaggagaagtatggggaagtagaggagatgaacgtctgtgacaacctgggagaccacctggtggggaacgtgtacgtcaagtttcgccgtgaggaagatgcggaaaaggctgtgattgacttgaataaccgttggtttaatggacagccgatccacgccgagctgtcacccgtgacggacttcagagaagcctgctgccgtcagtatgagatgggagaatgcacacgaggcggcttctgcaacttcatgcatttgaagcccatttccagagagctgcggcgggagctgtatggccgccgtcgcaagaagcatagatcaagatcccgatcccgggagcgtcgttctcggtctagagaccgtggtcgtggcggtggcggtggcggtggtggaggtggcggcggacgggagcgtgacaggaggcggtcgagagatcgtgaaagatctgggcgattctgagccatgccatttttaccttatgtctgctagaaagtgttgtagttgattgaccaaaccagttcataaggggaattttttttaaaaaacaacaaaaaaaaaaacatacaaagatgggtttctgaataaaatttgtagtgataacagtaaaaaaaaaaaaaaaaaaa

SEQ ID NO: 324 - DNA, 1256 bp, HOMO SAPIENS
accacactagcgcgctagaagagtggggcggaaagacatctcccgcgcatgtgtggaactggggggactgattccaagacaaggcgcccaccccacagagcaagttttctgaaacgtttggaatcgaagcctcttaaaatggcagatgacttggacttcgagacaggagatgcaggggcctcagccaccttcccaatgcagtgctcagcattacgtaagaatggctttgtggtgctcaaaggccggccatgtaagatcgtcgagatgtctacttcgaagactggcaagcacggccacgccaaggtccatctggttggtattgacatctttactgggaagaaatatgaagatatctgcccgtcaactcataatatggatgtccccaacatcaaaaggaatgacttccagctgattggcatccaggatgggtacctatcactgctccaggacagcggggaggtacgagaggaccttcgtctccctgagggagaccttggcaaggagattgagcagaagtacgactgtggagaagagatcctgatcacggtgctgtctgccatgacagaggaggcagctgttgcaatcaaggccatggcaaaataactggctcccagggtggcggtggtggcagcagtgatcctctgaacctgcagaggccccctccccgagcctggcctggctctggcccggtcctaagctggactcctcctacacaatttatttgacgttttattttggttttccccaccccctcaatctgtcggggagcccctgcccttcacctagctcccttggccaggagcgagcgaagctgtggccttggtgaagctgccctcctcttctcccctcacactacagccctggtgggggagaagggggtgggtgctgcttgtggtttagtcttttttttttttttttttttaattcaatctggaatcagaaagcggtggattctggcaaatggtccttgtgccctccccactcatccctggtctggtcccctgttgcctatagccctttaccctgagcaccaccccaacagactggggaccagccccctcgcctgcctgtgtctctccccaaacccctttagatggggagggaagaggaggagaggggaggggacctgccccctcctcaggcatctgggagggccctgcccccatgggctttacccttccctgcgggctctctccccgacacatttgttaaaatcaaacctgaataaaactacaagtttaatatgaagcccccaa

SEQ ID NO: 325 - DNA, 3149 bp, HOMO SAPIENS
cctttcccagagtgctctgcgccgtgaagaagcggctcccggggactgggggcattttgtgttggctggagctggagtaacaagatggcgtcgtccgcggagtgacaggggtccctctgggccggagccggcggcagtggtggcagcggtatcgccgccctagctcaccgcgccccttttccagcccgcgacgtcgccgcgcaagcgaggcagcggcggccgccgagaaacaagtggcccagcctggtaaccgccgagaagcccttcacaaactgcggcctggcaaaaagaaacctgactgagcggcggtgatcaggttcccctctgctgattctgggccccgaaccccggtaaaggcctccgtgttccgtttcctgccgccctcctccgtagccttgcctagtgtaggagccccgaggcctccgtcctcttcccagaggtgtcggggcttggccccagcctccatcttcgtctctcaggatggcgagtagcagcggctccaaggctgaattcattgtcggagggaaatataaactggtacggaagatcgggtctggctccttcggggacatctatttggcgatcaacatcaccaacggcgaggaagtggcagtgaagctagaatctcagaaggccaggcatccccagttgctgtacgagagcaagctctataagattcttcaaggtggggttggcatcccccacatacggtggtatggtcaggaaaaagactacaatgtactagtcatggatcttctgggacctagcctcgaagacctcttcaatttctgttcaagaaggttcacaatgaaaactgtacttatgttagctgaccagatgatcagtagaattgaatatgtgcatacaaagaattttatacacagagacattaaaccagataacttcctaatgggtattgggcgtcactgtaataagtgtttagaatctccagtggggaagaggaaaagaagcatgactgttagtacttctcaggacccatctttctcaggattaaaccagttattccttattgattttggtttggccaaaaagtacagagacaacaggacaaggcaacacataccatacagagaagataaaaacctcactggcactgcccgatatgctagcatcaatgcacatcttggtattgagcagagtcgccgagatgacatggaatcattaggatatgttttgatgtattttaatagaaccagcctgccatggcaagggctaaaggctgcaacaaagaaacaaaaatatgaaaagattagtgaaaagaagatgtccacgcctgttgaagttttatgtaaggggtttcctgcagaatttgcgatgtacttaaactattgtcgtgggctacgctttgaggaagccccagattacatgtatctgaggcagctattccgcattcttttcaggaccctgaaccatcaatatgactacacatttgattggacaatgttaaagcagaaagcagcacagcaggcagcctcttccagtgggcagggtcagcaggcccaaacccccacaggcaagcaaactgacaaaaccaagagtaacatgaaaggtttctaagcatgaattgaggaacagaagaagcagagcagatgatcggagcagcatttgtttctccccaaatctagaaattttagttcatatgtacactagccagtggttgtggacaaccatttacttggtgtaaagaacttaatttcagtataaactgactctgggcagcattggtgatgctgtatcctgagttgtagcctctgtaattgtgaatattaactgagatagtgaaacatggtgtccggttttctattgcattttttcaagtggaaaagttaactaaatggttgacacacaaaaattggtggagaaattgtgcatatgccaattttttgttaaaaccttttgttttgaactatactgctttgagatctcatttcagaagaacggcatgaacagtcttcagccacagttgtgatggttgttaaatgctcacaattgtgcattcttagggtttttccatccctggggtttgcaagttgttcacttaaaacattcttaaaatggttggcttcttgtctgcaagccagctgatatggtagcaaccaaagattccagtgtttgagcatatgaaagactctgcctgcttaattgtgctagaaataacagcatctaaagtgaagacttaagaaaaacttagtgactactagattatccttaggactctgcattaactctataatgttcttggtattaaaaaaaaagcatatttgtcacagaaatttagttaacatcttacaactgaacatgtatgtatgttgcttagataaatgtaatcactgtaaacatctatatgatctgggattttgtttttattttgaaatgggagcttttttgtttacaagttcattaaaaactaaaaactgtttctgtaaggaaatgagattttttttaaacaacaaaaaatgccttgctgactcactattaaataaaaatctccccaattttttgatagactacttcaagccatttgttacatggtattcctttgcaagtcaatttaggtttcgtgttataacttttcctctttttttaagaaaaatgaaaaaagtaattcttttgtctgaaggggaaaggcattctttcatttttttctttttttttttttttttttatgacttgcaggcacaatatctagtactgcaactgccagaacttggtattgtagctgctgcccgctgactagcagctggactgattttgaataaaaatgaaagcattaaagggtttccctacaaaacatttttctttaaaatacttttgaaatggctataagcagttgactttcacccttggagagcatcacactgtgtgaggttcagtgattgttgaccctccccagcccctcctgcttctttaagttatctgtgtgcgtgcgcttcctctcaatcttctttgcacgctcatttctttttctctgacccatgagaaaggaaaacttactgatgataatttttaaatagtgtaatttattcatttatagcatgtcaggataaattaaaagaacatttgtctggaaatgctgccgggagcctattgtgtaaatgtaggtattttgtaaaataaccttgaaattg

SEQ ID NO: 326 - DNA, 1313 bp, HOMO SAPIENS
tcgcgcccgcttttctctcgggtgatccggccgagtggccctgggttagcagctgctgcatttccccggctggctgcggtcactggtggcagtgctcaggcgcccgccgcccttgaccttcggccccgcgagctctaaccctacagcgcaggaagatcggccgccgcggccaggctctgatgctggtgtctggtagaagaaggttactcacagttctgctgcaggctcagaagtggccctttcaaccctccagagacatgagactagtgcagttccgggcaccccacctggtggggcctcacttgggcctggagacagggaatggtggaggggttatcaacctcaatgcctttgaccccacactcccgaagacgatgacgcagttcctagagcagggagaggccaccctctcagtggcaagaagagccctggctgcccagttgccagtcctaccacggtcggaggtaaccttcctggctccagtcacacgaccagataaggtggtgtgtgtgggcatgaattatgtggaccactgcaaagaacagaacgtgcccgtgcccaaggagcccatcatcttcagcaagtttgccagctccatcgtggggccctatgatgaggtggtcctcccaccacagagccaggaggtagattgggaagtggagctggccgtggtcattggaaagaaaggcaagcacatcaaggccacagatgctatggcccacgtggccggcttcactgtggctcatgacgtgagtgctcgtgactggcaaatgagacgtaatgggaaacaatggctgctgggaaaaaccttcgacaccttctgccctctgggccctgccttggtgaccaaggacagtgtagcagatccacacaacttaaagatctgctgccgagtgaatggggaagtggtccagagcggcaacaccaaccagatggtattcaagacagaggacctgatagcctgggtctcccagtttgttaccttttacccaggggatgtcatcctaactgggacccccccaggtgtcggtgtattcaggaaacctcctgtctttctcaagaagggggatgaagtccagtgtgagattgaagaactaggtgtcatcatcaacaaggtggtgtgatggctcctgcacaggccctgcacataggatgagggcatctgctcccactcagcctagcccagggaaaggcccagtgacaggtgtggacaggtgccagccctgcaagccgcctcttctcggtagaagggagaaggacagagctctcttcaataaattcgtcaggtcaaagcagcaaaaaaaaaaaaaaaa

SEQ ID NO: 327 - DNA, 1816 bp, HOMO SAPIENS
ggcgaccacggtgtcttcaaaagccccgtcagggttggcttcctggggccggaccgactgtgggtcagtttgcaccagcgctctggaatcgagttacgcgcgaaagggcagagtttctggaggaaaccgcagcctctcaaccgctgaccgggtctcagaaggcccccggcagggccgcttggcgggaactgaccacgcgccagtcaggctctccagggacctgcgcaggcgcgtgtgggcggagtcgtgcgcagggggcggggcttcgggaaggagccacagagagggcggggcgtaggacctgcgcttcgggggtggagtcggagcggcgcggcggcggtcatgcgggacgcggatgcagacgcaggcggaggcgctgacggcggggatggccggggtggccacagctgccgcgggggcgtggacacagccgcagctccggccggtggagctcccccagcgcacgcgccaggtccgggcagagacgccgcgtctgcggccagggggtcacgaatgcggccgcacatattcaccctcagcgtgcctttcccgacccccttggaggcggaaatcgcccatgggtccctggcaccagatgccgagccccaccaaagggtggttgggaaggatctcacagtgagtggcaggatcctggtcgtccgctggaaagctgaagactgtcgcctgctccgaatttccgtcatcaactttcttgaccagctttccctggtggtgcggaccatgcagcgctttgggccccccgtttcccgctaagcctggcctgggcaaatggagcgaggtcccactttgcgtctccttgtaggcagtgcgtccatccttccctagggcaggaattcccacagttgctactttcctgggagggcctcatgttttatctggttcttaaatgtttgttactacagaaaataaaactgcgctactattccaagtctgagtttatttgcagctggggcacctcccaatattcttgttgtgcttgggttgctgggggggggttctagaattcagatattcaaggagtacaaggaaattgaagacaatttaggaaatggaagaaaatgaaaatcaattgggttctgtcattcaggattaactactgtcaacattttggaatacttcctcagttttacagttgcacttacatagtaaatgtgtaactgtaatatacaccacataatatttgcaagtttagtgttaaatttttttcctgatttttaaatctaacatgagcttttttcctctaacgatcagtgaagaaagtgctggggcaattgactagtgtctggggcaaggagttggctccctggaaaatacagtgtctccagccttagggctcttttatagattctatcagattttctgagagtgaaaaggaagaggtacaactgcttttattctcagaaaacaaggaaatggtttgatccttttgagtcttgctttgaagatgtgctgtgtgggaccagagcagctcttaactgtaggcttgtttccctctatggaggcaacaaacaccattctgggcaccctggccagtgctgcctaggtgaacatgagcttctctatcctggtgggtggggacagctgctagtccctgtcctgcttgcacactggagttaccgttcatcctctcctgctggggtgatggccttccctggtcttgggtagcttcctcacacgcctgtgctcaccagtagtcgtagtccgctgcacactggaacgggagcctctgtggatatccagggttctttccctgtgcagctctcttctctctggttctccgccctgcaaactccag

SEQ ID NO: 328 - DNA, 2401 bp, HOMO SAPIENS
tgtttctcctgcgttgctccgagggcccaatcctcctgccatcgccgccatcctggcttcgggggcgccggcctccaggcccccgggaggagaactcctagggctactaaatcctcgctggaggcggtggcttcttatgcgggaggacgtggcggagggcctgactttgggagccggggtcagtcggcctctgaggtccgcagagggacgtgatgggcgggaatggggactaccgggctcctccactggtgggggcgccggcccgccgtggggtgcgggccgcctggggtccgtgcggactccggaggtccggtgtctagtggtgagtggtggccgcaacgaggaaaaagttttgggggaaagaaaagtcgggtggaggcgtaacacgttactacaagagtgttgcgtacaggagggctcttaaagtgggtcatagcccgaaggtgttgagagagacggcactcactacctgcagccctgacagcaaaggggtttctgtagagcgggagggaggaggtgtagagggttacggttgagttgtgccctgcggatgcgtcgagtcattttacgcctggaagatccagcattggattgaaacaggctgtattttcttccaaagggttgactggattggtgaggcccgtgtggctacttctgtggaagcagtgctgtagttactggaagataaaagggaaagcaagcccttggtgggggaaagtatggctgcgatgatggcatttcttaggacacctttggattaataatgaaaacaactactctctgagcagctgttcgaatcatctgatatttatactgaatgagttactgtaagtacgtattgacagaattacactgtactttcctctaggtgatctgtgaaaatggttcgctattcacttgacccggagaaccccacgaaatcatgcaaatcaagaggttccaatcttcgtgttcactttaagaacactcgtgaaactgctcaggccatcaagggtatgcatatacgaaaagccacgaagtatctgaaagatgtcactttacagaaacagtgtgtaccattccgacgttacaatggtggagttggcaggtgtgcgcaggccaagcaatggggctggacacaaggtcggtggcccaaaaagagtgctgaatttttgctgcacatgcttaaaaacgcagagagtaatgctgaacttaagggtttagatgtagattctctggtcattgagcatatccaagtgaacaaagcacctaagatgcgccgccggacctacagagctcatggtcggattaacccatacatgagctctccctgccacattgagatgatccttacggaaaaggaacagattgttcctaaaccagaagaggaggttgcccagaagaaaaagatatcccagaagaaactgaagaaacaaaaacttatggcacgggagtaaattcagcattaaaataaatttgaggagctcaagcttgggaaaatggtgtgcattccttgtatcgtcattccagttctgctctggatctacaaaaaattcctggagccatatatataccctctggtttcccccttcgttagtcgtatatggcctaagaaagcaatacaagaatccaatgatacaaacaaaggcaaagtaaactttaagggtgcagacatgaatggattaccaacaaaaggaccaacagaaatctgtgataaaaagaaagactaaagaaattttcctaaaggaccccatcatttaaaaaatggacctgataatatgaagcatcttccttgtaattgtctctgacctttttatctgagaccggaattcaggataggagtctagatatttacctgatactaatcaggaaatatatgatatccgtatttaaaatgtagttagttatatttaatgacctcattcctaagttcctttttcgttaatgtagctttcatttctgttattgctgtttgaataatatgattaaatagaaggtttgtgccagtagacattatgttactaaatcagcactttaaaatctttggttctctaattcatatgaatttgctgtttgctctaatttctttgggctcttctaatttgagtggagtacaattttgttgtgaaacagtccagtgaaactgtgcagggaaatgaaggtagaattttgggaggtaataatgatgtgaaacataaagatttaataattactgtccaacacagtggagcagcttgtccacaaatatagtaattactatttattgctctaaggaagattaaaaaaagatagggaaaagggggaaacttctttgaaaaatgaaacatctgttacattaatgtctaattataaaattttaatccttactgcatttcttctgttcctacaaatgtattaaacattcagtttaactggtagttca

SEQ ID NO: 329 - DNA, 2894 bp, HOMO SAPIENS
ctcctgcgagggcttggtttagggcttcagctctctgcgttctcggctccgggaggcctcggtgattcagccacagcctctgcctcccgttgctctgtgacctgagggtattggacaatttgtagctaagactcccggataccctgaagtcgggaaatggaactcgtaacattcagggatgtggccatagaattctcccctgaagagtggaaatgtctggaccctgcccagcagaatttgtatagagatgtgatgttggagaactacaggaacctggtctccctgggttttgtgatctctaacccagacctggtcacctgtctggagcaaataaaagagccctgcaatttgaagatacatgagacagcagccaaacccccagctatatgttctcctttcagccaagacctttcaccagtgcaggggatagaagattcattccacaaacttatactgaaaagatacgagaaatgtggacatgagaatttacaattaagaaaaggctgtaaacgtgtgaatgagtgtaaggtgcagaaaggagttaataatggagtttaccagtgcttgtcaactacccagagcaaaatatttcaatgtaatacatgtgttaaagtttttagtaaattttcaaattcaaacaaacataagataagacatactggagagaaaccctttaaatgtacagaatgtggcagatcgttttacatgtcacacctaactcaacatacaggaattcatgctggagagaaaccctacaaatgtgaaaaatgtggcaaagcctttaataggtccacatcacttagtaaacataagagaattcatactggagagaaaccctacacatgtgaagaatgtggcaaagcctttagacggtccacagttctgaacgaacataagaaaattcatactggagagaaaccctacaaatgtgaagaatgtggcaaagcctttacaaggtccacaacactgaatgaacacaagaaaattcatactggagagaaaccctacaaatgtaaagaatgtggcaaagcctttagatggtccacaagcctgaatgaacataagaatattcatactggagagaaaccctacaaatgtaaagaatgtggcaaagcctttagacagtccaggagcctgaatgaacataaaaatattcatactggcgaaaaaccctacacatgtgaaaaatgtggcaaagcttttaaccaatcctcaagtcttattatacacaggagcattcattctgaacaaaaactttacaaatgtgaagaatgtggcaaagcctttacttggtcctcatcccttaataaacataagagaattcatactggagagaaaccctacacatgtgaagaatgtggcaaagctttttataggtcctcacaccttgctaaacataagagaattcatactggagagaaaccctacacgtgcgaagaatgtggcaaagcttttaaccaatcctcaactcttatattacacaagagaatccattctgggcaaaaaccttacaaatgtgaagaatgtggcaaagcctttacacggtccacaacactgaacgaacataagaaaattcatactggcgagaaaccctacaaatgtgaagaatgtggcaaagctttcatatggtccgcaagcctgaatgaacataagaatattcatactggagagaaaccctacaaatgtaaagaatgtggcaaagcttttaaccaatcctcaggccttattatacacaggagcattcattctgaacaaaaactttacaaatgtgaagaatgtggcaaagcctttactcggtccacagccctgaatgaacataagaaaattcattctggagagaaaccctacaaatgcaaagaatgtggcaaagcctataacttatcctcaacccttactaaacataagagaattcatactggagagaaacccttcacatgtgaagaatgtggcaaagccttcaattggtcctcatcccttactaaacataagataattcatactggagagaaatcctacaaatgtgaagaatgtggcaaagcttttaatcggccctcaacccttactgtacacaagcgaattcatactggcaaggaacatagttgaatgacatttctagtaatctctaattccagtgtctttacacagcaaataaattggagaatattgctcccatataaacttgtattatttttcttattttaaattttttaaaatttctgtaggtacatagtatgtgtatctattcatggcttatttggattattttgatacaggcatatgacatgtaattatcacatcagagtaaatgagttattcttcacaagcatttgttctttgtattacacacagtccagttatacactttaattttttttttttttttttttttttgagacagagtctcgttctgtcgcccaggctggagcgcagtggtgcgatcttggctcactgcaacctccacctgctgggttcaagcaattctcctgcctcagcctcatgagtagctgtgactacaggcaggtgccaccatgcccagctaattttttgtattttcagtagagacagggtttcacaatgctggccaggctgttctcgaactcctgagctcatgatccacccacctcggcctcccaaagtgctgggattacgggtgtgagccatcgtacctggccactttaattatttttaaatgtgcaattatttttttactacaggttattttatgattataataagtatatgagtataattataattcacacatttctaagtcatgaatgcttttaaaaaatgttccatatttatctttgaacatgtagcatctctttccgcaaataaatgcagactttggttttgatttacatcaaaaaaaaaaaaaaaaaaaaaaaaaaaaa

SEQ ID NO: 330 - DNA, 1199 bp, HOMO SAPIENS
accgaccggatacacgggtagggcttccgctttacccgtctccctcctggcgcttgtcctcctctcccagtcggcaccacagcggtggctgccgggcgtggtgtcggtgggtcggttggtttttgtctcaccgttggtgtccgtgccgttcagttgcccgccatggctgagctggatccgttcggcgcccctgccggcgcccctggcggtcccgcgctggggaacggagtggccggcgccggcgaagaagacccggctgcggccttcttggcgcagcaagagagcgagattgcgggcatcgagaacgacgaggccttcgccatcctggacggcggcgcccccgggccccagccgcacggcgagccgccggggggtccggatgctgttgatggagtaatgaatggtgaatactaccaggaaagtaatggtccaacagacagttatgcagctatttcacaagtggatcgattgcagtcagagcctgaaagtatccgtaaatggagagaagaacaaatggaacgcttggaagcccttgatgccaattctcggaagcaagaagcagagtggaaagaaaaggcaataaaggagctagaagaatggtatgcaagacaggacgagcagctacagaaaacaaaagcaaacaacagggtggcagatgaagctttctacaaacaacccttcgctgacgtgattggttatgtggcagcagaagaagcctttgtaaatgacattgacgagtcgtccccaggcactgagtgggaacgggtggcccggctgtgtgactttaaccccaagtctagcaagcaggccaaagatgtctcccgcatgcgctcagtcctcatctccctcaagcaggccccgctggtgcactgaagagccaccctgtggaaacactacatctgcaatatcttaatcctactcagtgaagctcttcacagtcattggattaattatgttgagttcttttggaccaaacctttttgtctttagagttgttcattgtttgtgattgcatgtttccttccttcaactgtgttctccctggcattcagagaggagggagaggaggaagaggaaggggagggaagcttcccaagagtagcctcaacctgtgcttctgtgcattattctgagaataaatttctgtttcaaactgtaaaaaaaaaaaaaaaaaaaaaaaaaaaaaaaaaaaaaaaaaa

SEQ ID NO: 331 - DNA, 2811 bp, HOMO SAPIENS
gctccaggaagtgcgggggctccagccgcccggccggccgcgatgcattctggggaaggagcagcaccaaatccaagatggcggccagcaggaggctgatgaaggacaaccctccatatgataagggagccttcagaatcgaaatcaactttccagcagagtacccattcaaaccaccgaagatcacatttaaaacaaagatctatcacccaaacatcgacgaaaaggggcaggtctgtctgccagtaattagtgccgaaaactggaagccagcaaccaaaaccgaccaagtaatccagtccctcatagcactggtgaatgacccccagcctgagcacccgcttcgggctgacctagctgaagaatactctaaggaccgtaaaaaattctgtaagaatgctgaagagtttacaaagaaatatggggaaaagcgacctgtggactaaaatctgccacgattggttccagcaagtgtgagcagagaccccgtgcagtgcattcagacaccccgcaaagcaggactctgtggaaattgacacgtgccaccgcctggcgttcgcttgtggcagttactaactttctacagttttcttaatcaaaagtggtctaggtaacctgtaaagaaaggattaaaaatttaagatgttctagttctgctctctttgttttaaaaatcactgcttcaatctacttcaaaagaatggtgtttcttttcttgtccaattttatccaaaatcttcaagttacatttaacccataaggtttaaaaaaaaggaaaaaaaacggttgtggttccctttcttccctacccttgccactcccactttctggcaccgagtttatttttcacttacttacttccccagaccccgggctcgcctccacaaaggagaagagactgccctggcggtcctggtggcttttcttagcatgtgtggcactgttgcccagtgtgggagttggtttaaattctcctgactccagtttataacatccttttaaaaaatttaaaaacaaacagccacacccctcctccagtccttctcctcagttcttgtgtgaaactccagctgatgttaccacagtaacatcagttaattgggcaagccctgatgtcagtgtgtgtaactgacctctggcctggcctgcacagagaagccctataatcacaggtctgtggtggccccgaaatggggggcctgctagtcaggaggatgctgtgcacactgtgtgtgatgaatctcgccagaaaggctcctgaggtcccaggttggcacttctccctgcagccattgtagaagatctgctggtccttgcaggcaaagctacagccagaatgtccgtttgaaactcctagctcatctgtcaccgagcttcatccgaatgtgccacggagcttgctctccacttcctccgtgcagtggccctgccacagccctccctcggcacactttgaccctttgtaggattggaattagcaggactcggctatttaaagcaccagtctggggtcgcctgggcccctgctgaccccctcctccagagcagccagcccagcccgggaacaagacggacttcctctcccttcggactcacagcctttgcagagtcaagctccacttgaagctcactcagtaatatcctttcaatgtgttttatattgttttgactgcctttttttgtagaaataaaaattgaccttagaatttatcgtcagataaacttgtaaagatttgaatattaatgtcttttcaaggcaaatgggattgtccccgcactagtagagaatccatgtcgctctgacaccccaaggaagccgacgatccaaatgccgtgtgtcaccaaccccgcttctgccactggcggcttcccttcttggctcttgggggggactagatcctgtggagaagatgacttaaactttgctttttgttttaattttaattctataacttgagatctttccggggcctacaggcgtgtaagacagcttggtctggtctgtgcagaagtggggagtgatgggcaggttcggcagcctaacattgttcaggcgcatggcccctgcggtgtgtacacgaactcggcttcttttgtcctaggtacgccaagggcaggtttctggagactcccttgtgcccgggatggcaagggcaccgggctggcgtttccacatctgtcttcattagcagaaaagtgatgatggattttatttcactcacactccagtttgtaataaaatgccaaattctgtcagctatccaaacaagccaccatttgttcttgttgcttctctggatccagaaatgttgccattcttggaaactgtcccattgcttcgtatttctgccaacgtagctctgcctgcctgtcaacccctcactgcactctgctcatcacgggaggatacctgtgtgccggcagcccctcagggactctcagccctggcactggcaccccagggttggccccgtcagcagaggcttggctttcgagccagtgggtgtctctcctttgggcctgggcggcttgctcctgccagccatgccttcagggtaggctctgagcaagctggcgaacagccctggctgctccaaaaccaaaaagctgggtcctctggaggaggggcgagctgtggagcagccacccactgctgccccaagctcactcaggaattcacacccgcctggtttcttgaagtgtgctgggtccttccctctgctccctactccccaccacggcagagaataggctttctaagatgctgcgatcccgttctgctgcccgtaataaaaatgctctcagacactg

SEQ ID NO: 332 - DNA, 847 bp, HOMO SAPIENS
acagcgagcggagccgcggtccggacggcagcgcgtgccccgagctctccgcctccccccgcccgccagccgaggcagctcgagcccagtccgcggccccagcagcagcgccgagagcagccccagtagcagcgccatggccgggtggaacgcctacatcgacaacctcatggcggacgggacctgtcaggacgcggccatcgtgggctacaaggactcgccctccgtctgggccgccgtccccgggaaaacgttcgtcaacatcacgccagctgaggtgggtgtcctggttggcaaagaccggtcaagtttttacgtgaatgggctgacacttgggggccagaaatgttcggtgatccgggactcactgctgcaggatggggaatttagcatggatcttcgtaccaagagcaccggtggggcccccaccttcaatgtcactgtcaccaagactgacaagacgctagtcctgctgatgggcaaagaaggtgtccacggtggtttgatcaacaagaaatgttatgaaatggcctcccaccttcggcgttcccagtactgacctcgtctgtcccttccccttcaccgctccccacagctttgcacccctttcctccccatacacacacaaaccattttattttttgggccattaccccataccccttattgctgccaaaaccacatgggctgggggccagggctggatggacagacacctccccctacccatatccctcccgtgtgtggttggaaaacttttgttttttggggttttttttttctgaataaaaaagattctactaacaaaaaaaaaaaaaaaaaaaaaaaaaaaaaaaaaaaaaaaaaa

SEQ ID NO: 333 - DNA, 3008 bp, HOMO SAPIENS
gggtgccgacggcggcgccgggacgggcgtggggggtagggcgagtcatatgatccgctcggcttcctgggtctggctgctgccgcccgccggtgtccgcccgtgtcgcgccggggcaccaaggagccgttggagggtccgggcggaggcccgctcgtgtggaagtcgtcgacgccgccgctcgtccgtcctcccgtccgttctcgctcccggccgccatcatgctggcgctcatctcccgcctgctggactggttccgttcgctcttctggaaggaagagatggagctgacgctcgtggggctgcagtactcgggcaagaccaccttcgtcaatgtcatcgcgtcaggtcaattcagtgaagatatgatacccacagtgggcttcaacatgaggaaggtaactaaaggtaacgtcacaataaagatctgggacataggaggacaaccccgatttcgaagcatgtgggagcggtattgcagaggagtcaatgctattgtttacatgatagatgctgcagatcgtgaaaagatagaagcttcccgaaatgagctacataatcttctagataaaccacagttacaaggaattccagtgctagtgcttggaaacaagagagatcttcctaatgccttggatgagaaacagctaattgaaaaaatgaatctgtctgctattcaggatagagaaatttgctgctattcaatttcttgcaaagaaaaggataatatagatatcacacttcagtggcttattcagcattcaaaatctagaagaagctgaagcatctcctgaagtcttccagtccttcttggctataatcctagaattattgtccgttcctctgaagtaattcccagaatacggtccttcctaaaccccagaaattgcctttttcagagtttatttctcatgtgcactgctgaagatgaatatccctaatccttcataaagaatcagctagagttgtcatgataaagtcagcacacacaaaaaggcttcttacacatacctgtcttaaaccatgtgtagagctttaaaaacagaaaaaaaaccccatatacttatgaccatcttaaatcaagaaaattgcatatttccattctggtctttctgggccagatttttatattggttttcagtaaatgtctatctataatatttcattatagagtccagtagcttaatactgacactgacttgatacagcatgaagtttctagtgccacacacagtatttagaaaacctttaggcgtgaatgactcatgtgggatatatgtaaacataatgtttattttatctcacaaatgcatgtgaaatgtataattacatcttaggaatccaaaatggtctgcagagagtgagcggaggcaccagatcaatgttggttctttgcactggtgagattctgcctgatgaatattaaagatatcctgctttctgagaactctatcaccagatggcagttgggatatgggaggaactaaagcatcctgttttgtatctgtccagatcattatttctgtctcttgttttttcttcctggttcaggatacttttttaaggggttgagaattgaagattttccaaaagcgttcatgaatttagagcattccacccaatataataaaacctgttaagaatgtcagtctttgttcaaacatctgtttgttctatctccagtcattaaatcagtgctgctgcatgacactcttaactcctgactttttatatccagtcataaagttgactttcagcacaaaagatacttataaacaaataaaaaatttttatttttctctcttactgatgtaagctttggcactcttttgactggtgccattagacatcttgattattgtgacaactctagacctgcctgctttatctaatgtaatcatgctcaatgtctacaggttgtttaataatcagtcacacagagaactgaggaactgatgctgtttgtttgcttctatgatacagagatgtctaaaaacttcaaatggacatgttttgtagtttagcgacttccgtatacataaagggacatattaatactggttcatttgtaaattattattcatatagaccactgtagtagataaaactctatggtacacctgcttatgtgttgcctcacactgtgtgtgattttgtttcttttgttaagcagcacttatgtagactgcatttccaaatgtgttgagcactcagagtgtagtcaacagtaagttcttttaatgaatatcagttttaatttatagactgccatggccttaaaaatattctgtacaatatactgcactgtgttgcacagacactacttgcttttctccattcatatttttatgagtagaatctgggcttttaaatttctcttcttattctttgaagcatgttgcatactaccctggtgggatggatggttctgtaaatgaagggatatttaaacttgctactgttgttcaacaccattaatggtcagtgtgaaccattacaaagaatgtggcaacttgcttgtgcctaaaaggaggaattggaactagaatgtgtgactctgtggggactgcataggtttgttaattgacctatagctaaaccttaatgtgtttgtgtgtctatacattgctttccgcatttcaagacatccagacgctattaccaacattttcctgtgcattaacctctgcatgtgaaaacttttaacagttactgaactatgtaaatatgtgaatttttttatttaggtggatgcattttttgtctgtttactgctcttctcagctttattcaataaacttgcattttaagggttgtattggcaattttaacttaaaatgtgcatcatgatggaaggtgcagacttttttggaagtttccgagaggagggtctatagaccatttgtcagaaatcagatcagccctcaaagaatggggtctgtgggctagttaaaatagaaataaacttttaaaatatccacagaaaaaaaaaaaaaaaaaaaaaaaaa

SEQ ID NO: 334 - DNA, 9604 bp, HOMO SAPIENS
ctcggtgagcgcgccgaggaagagaggcgagcggagagtggaggaggaggcggcggcggcgggagcggtccccaggaatgtcgctgccgccgccaccgccggggccgctgccgttgaggaggagacggaggagaccgacgttgttaggaagatgatccctatgatcttgaagatgtttctgcacagaaatgagggaaatacaaagaaccaaatacagttctgaaatttgggatctgtattttgagatgattttattttcagaatgagaagcatatctggttacctttatgaatgtagagacatgagaagagagttatgatggcaaaaaacaaagagcctcgtcccccatcctataccatcagtatagttggactctctgggactgaaaaagacaaaggtaactgtggagttggaaagtcttgtttgtgcaatagatttgtacgctcaaaagcagatgaatattatccagagcatacttctgtgcttagcaccattgactttggaggacgagtagtaaacaatgatcactttttgtactggggtgacataatacaaaatagtgaagatggagtagaatgcaaaattcatgtcattgaacaaacagagttcattgatgaccagactttcttgcctcatcggagtacgaatttgcaaccatatataaaacgtgcagctgcatctaaattgcagtcagcagaaaaactaatgtacatttgcactgatcagctaggcttagaacaagactttgaacagaagcaaatgcctgaagggaagctcaacgtagatggatttttattatgcattgatgtaagtcaaggatgcaataggaagtttgatgatcaacttaaatttgtgaataacctttttgtccagttatcaaaatcaaaaaaacctgtaataatagcagcaactaaatgtgatgaatgcgtggatcattatcttagagaagttcaggcatttgcttcaaataaaaagaaccttcttgtagtggaaacatcagcacgatttaatgtcaacattgaaacatgttttactgcactggtacaaatgttggataaaactcgtagcaagcctaaaattattccctatttggatgcttataaaacacagagacaacttgttgtcacagcaacagataagtttgaaaaacttgtgcagactgtgagagattatcatgcaacttggaaaactgttagtaataaattaaaaaatcatcctgattatgaagaatacatcaacttagagggaacaagaaaggccagaaatacattctcaaaacatatagaacaacttaaacaggaacatataagaaaaaggagagaagagtatataaatactttaccaagagcttttaacactcttttgccaaatctagaagagattgaacatttgaattggtcagaagctttgaagttaatggaaaagagagcagatttccagttatgttttgtggtgctagaaaaaactccttgggatgaaactgaccatatagacaaaattaatgataggcggattccatttgacctcctgagcactttagaagctgaaaaagtctatcagaaccatgtacagcatctgatatccgagaagaggagggtggaaatgaaggaaaaattcaaaaagactttggaaaaaattcaattcatttcaccagggcagccatgggaggaagttatgtgctttgttatggaggatgaagcctacaaatatatcactgaggctgatagcaaagaggtatatggtaggcatcagcgagaaatagttgaaaaagccaaagaagagtttcaagaaatgctttttgagcattctgaacttttttatgatttagatcttaatgcaacacctagttcagataaaatgagtgaaattcatacagttctgagtgaagaacctagatataaagctttacagaaacttgcacctgatagggaatcccttctacttaagcatataggatttgtttatcatcccactaaagaaacatgtcttagtggccaaaattgtacagacattaaagtggagcagttacttgctagtagtcttttacagttggatcatggccgcttaagattatatcacgatagtaccaatatagataaagttaacctttttattttagggaaggatggccttgcccaagaactagcaaatgagataaggacacaatccactgatgatgagtatgccttagatggaaaaatttatgaacttgatcttcggccggttgatgccaaatcgccttactttttgagtcagttatggactgccgcctttaaaccacatgggtgcttctgtgtatttaattccattgagtcattgagttttattggggaatttattgggaaaataagaactgaagcttctcagatcagaaaagataaatacatggctaatcttccatttacattaattctggctaatcagagagattccattagtaagaatctaccaattctcaggcaccaagggcagcagttggcaaacaagttgcaatgtccttttgtagatgtacctgctggtacatatcctcgtaaatttaatgaaacccaaataaagcaagctctcagaggagtattggaatcagttaaacacaatttggatgtggtgagcccaattcctgccaataaggacttatcagaagctgacttgagaattgtcatgtgcgccatgtgtggagatccatttagtgtggatcttattctttcacccttccttgattctcattcttgcagtgctgctcaagctggacagaataattccctaatgcttgataaaatcattggtgaaaaaaggaggcgaatacagatcacaatattatcataccactcttcaattggagtaagaaaagatgaactagttcatgggtatatattagtttactctgcaaaacggaaagcttcgatgggaatgcttcgagcatttctatcagaagttcaagacaccattcctgtacagctggtggcagttactgacagccaagcagatttttttgaaaatgaggctatcaaagagttaatgactgaaggagaacacattgcaactgagatcactgctaaatttacagcactgtattctttatctcagtatcatcggcaaactgaggtctttactctgttttttagtgatgttctagagaaaaaaaatatgatagaaaattcttatttgtctgataatacaagggaatcaacccatcaaagtgaagatgtttttctaccatctcccagagactgttttccctataataactaccctgattcagatgatgacacagaagcaccacctccttatagtccaattggggatgatgtacagttgcttccaacacctagtgaccgttccagatatagattagatttggaaggaaatgagtatcctattcatagtaccccaaactgtcatgaccatgaacgcaaccataaagtgcctccacctattaaacctaaaccagttgtacctaagacaaatgtgaaaaaactcgatccaaaccttttaaaaacaattgaagctggtattggtaaaaatccaagaaagcagacttcccgggtgcctttggcacatcctgaagatatggatccttcagataactatgcggaacccattgatacaattttcaaacagaagggctattctgatgagatttatgttgtcccagatgatagtcaaaatcgtattaaaattcgaaactcatttgtaaataacacccaaggagatgaagaaaatgggttttctgatagaacctcaaaaagtcatggggaacggaggccttcaaaatacaaatataaatctaaaaccttgtttagtaaagccaagtcatactatagaagaacacattcagatgccagtgatgatgaggctttcaccacttctaaaacaaaaagaaaaggaagacatcgtggaagtgaagaagatccacttctttctcctgttgaaacttggaaaggtggtattgataatcctgcaatcacttctgaccaggagttagatgataagaagatgaagaagaaaacccacaaagtgaaagaagataaaaagcagaaaaagaaaactaagaacttcaatccaccaacacgtagaaattgggaaagtaattactttgggatgcccctccaggatctggttacagctgagaagcccataccactatttgttgagaaatgtgtggaatttattgaagatacagggttatgtaccgaaggactctaccgtgtcagcgggaataaaactgaccaagacaatattcaaaagcagtttgatcaagatcataatatcaatctagtgtcaatggaagtaacagtaaatgctgtagctggagcccttaaagctttctttgcagatctgccagatcctttaattccatattctcttcatccagaactattggaagcagcaaaaatcccggataaaacagaacgtcttcatgccttgaaagaaattgttaagaaatttcatcctgtaaactatgatgtattcagatacgtgataacacatctaaacagggttagtcagcaacataaaatcaacctaatgacagcagacaacttatccatctgtttttggccaaccttgatgagacctgattttgaaaatcgagagtttctgtctactactaagattcatcaatctgttgttgaaacattcattcagcagtgtcagtttttcttttacaatggagaaattgtagaaacgacaaacattgtggctcctccaccaccttcaaacccaggacagttggtggaaccaatggtgccacttcagttgccgccaccattgcaacctcagctgatacaaccacaattacaaacggatcctcttggtattatatgagtaggaagtgattgcaaacaggctggatttggacaaaaagcaaatctagacatgcatgtttcagggttcagtagtatacttcatgtttcatacagataattcacattcaaaattacattttctctttgaactagatggtattccttattcacttacattacaaatctaagaccatgtgataagcatgactggagaggtttaatttttataaacaaaaatagctataaagtacaaagctgctgctgcatgcaaccttattgcaatcagtatatcattcctgtggcaatttctgtcaccttatattgtgaataaaatttttctatagaaattaaatgatttaaaaactcacctatatgaaacatttaatgcttttcagcctgctttctggctgattttgttatttgatgtgctaatttgggcaacttaatttacattctggcagtcggtgtagataactaaaagcccagttaagtattttataatttcaggctactgaggccatgcttgggatgttgtttgaaagaaagaaaaaatacacttgacatatttcacatttctgtaccttcatctttacttccaagtaaacccgtggatgatttgatgagggataaatgaacctatttcttttacacacataccaaggacatgcttgtggctaaagtgagttgataatgttgtgcaaaggatagttgtcaccaactcatttctttatggtccataatgaaataaaaattttgtatactgttaattctgtaaacagatgcatgttcaaaagatctatgatggtcttgtaatcttaatctaatatattttagatattttaattttttccctcttggggaacacatttagtatagtgtagaaaatacttccatgacattttcatataaggttatataacttttcatacataaacatgaaatttgttgtagaaaattctttaaaccaaacatttaaatctaggacttcaatttaatttgttccttgaatctatttttatgtggcccttaaaaaatatccaaaaaacccattgctaatatagcaataaaaatactttgggtactgacagactctttggagtgtttatattacaaatttgtattcatattcttttctgtgatgtgttgtactaaaatccaaaatggcttttgcaccatttttaagccaattttttcctttgatgttggtaccagaattactataagtgactgctgcttttgggggtaaacattttgttagtgaagataaaaccagaacactaaattatggataaaattttcagaataggtggcacaggtaaatttcactaggttatattttgtgtagtaaagaaaaaaattatttggtcaatgttatcttaattcatactacaatttaagattatcttatgtgtattatagtaaatagatgattttcagattcaaggctcctaagagtttgatttgctctgttttttcctaaaataaatattgtctctcccaactgttaagttctaggtattgtacttccaattttaacttcagaaccaagatgttggcatgaaccaggctgctgttgaagtacatgtatattataaattatcttatttgtgttatactcttacatgttatcttttctaagaaaacaaagtccctattattcctattgcaaagcacacaggaattaagaaagtacagtaatttttaaaaaaaaatccggtaaatgtagtattcttaacctgttctatattacttatacctattgtctatatagctttaatttatagttgtcagtttaactattggcatgtctggcaaagaaaattaaactttaagagttttataaactgtttctaggttgctaaagaatttatttttctactatatatggtatagacaaagcatcaaactatgtacaggaaaaaagcctgactatttctatttggaagtaggctgaaaagagaattttcaaaactgttcgtgtcttcagttcattctgtcataactttgctattgtaatatgtgaataccagtttatttaagctgttctcttttatactgtattaatttaatgttcatctgcgtttagtaccatttttgttattaaaactggcatttaccgtttttcacattaacccaccttgcaccttcccccaaacttatctccacttttctatgcattctatcattgatttgacacacttcatagtgagtcatttaaatactctacgtttggttcaattaaccagtaggttacagttattgaaaattaaagtacagtttaaagctcagtctgttacactgaattgattgtgtttgtttttgccaagggtttagatatgcttttaaatattagaaacatctaagaacagaataacataattaaacttttttctggtaagttactggaaggtttcactgtttagggacctatcatatgagacttcttaaaggattaaaagaataggatagtctcataattgtgagtaaacatcaaggcattatattttacaatactgaataaaatttcatctacacacatgttgccattgtttcatttaaggttcagtgcttatagttaactacaatattggacctaacaggatctagattagcaatataaagaagcatagtggtactctgtttcacactttcagtagatttattagaagtcaaattctattcaacagacacttattaggatatacaactaatttaagaataaaattccaggcacaatatattttttttaaatggtatttgttagtagtgcttcttccccttaacatttacagtgtaaatactgcaggtaaccgcaatctaagttagccaaaaagcagctttttttcccatactgtatgtaaataatgtagacctgggtttttttgtttatttgggtttgtttttttttttgaggtactggaatctaattaatatctcttaggtatcaacaaaagggaacaattggaatgagaatttaggccttagcttccatggtgatttttagttttttatacagtaataattgtgatgctatttgtcaactggatataaatacacatataattttaaaaagtcaaaagtgcttttgtttctttgtttaatgtaatttttgtgcttcacctacaggatgctgcagtaaattaaatatcagtgaagcttctgatgtataaagaatgctatgaataaaacattaagaagctgtgtaattttaagttatagttgcctctatttttaccatttcattggtaaaaattagctaatttttttcaagtgaaatgaaaaataaaaatataaatttatcaatatgatggaaatcttattaaggagatgtattattgaattttcactgtacctgaaaaggagattcaaaattttttctggggatgtatataggtgaaaatttgattttttaaattatcaggaaaacaagataatgcacagatttctaagactaagatcttacctggatgtgatttttgagctgtggctagacattctttagagccactggaaatattttgaaaactattctagttatagcagagctgctaatattaacgaatatatttgtgtcttcatggtttgtgactattaggccaaattttgtggtatatgttgtcagtctggatctggtgaggtctgttcaacatgaatctttgtgttatcttgaatttagtagtttcaaggtacttaaattcttaacagtttctaatttgtttcaatacatatgggacatggttgatttttttactgtattagaactcttggaagttcttagccttttcaggttatgaaatacctgaaagtaaaattttctaagatttaataagggaagatactattcaaatcattttcttaggatagcatctttacatacaatgagaggattgtacaagcattaatctcatattccaacatccagttacttgatgtgatccaagtaccctggtctttttgaagcagttaaaatctaattaattaactttgggagtcttcactattcaattgatcctcatcattgtcctatttgcatgactccattttttcctccactatatgagttttctttgtcagggggagaggagtgggaagagtcacagaatctcatattcacatcttaattaaattgtgtgaaattagtcttttgtggaaattctgtaggcagtatgattttgaaaagctaaccaatgataattagcattttagttaatactaaatgcataaaattataacccttgaaattaatttggtgctggcagttctggtttagtcatttttaccagtagttagtagtattaagacctgcagtatatgcactttttgagtagctgtcaaataattgtagttgagaaacaacttgtttattctcacaattcagattttctattcagttttgtctcaaatagtaagttattgtgaacaatttaataacggccctcctgttctagtttgcctaatattttagttaagatttagtgttttaacctatttttttaagtttattttttgtattagattttatttgaataagttatgtgggtttagtaattgacctatttattcattgcttcactaattcatccagattagttttaagtgtgtatatgtatttgctcaccagatcattttcttgggaccttgaactgtgaatgttttgtcctaaccatttaatattttctaggtacttgctgcaagttcttgaactattttaccagctttaactttggggctcttagtttcttttctccagattcttgttattttattttatccaaataaatatttaggtgttctaagaa

SEQ ID NO: 335 - DNA, 2339 bp, HOMO SAPIENS
ggtccaccatggccctgctgcactccggccgcgtcctccccgggatcgccgccgccttccacccgggcctcgccgccgcggcctctgccagagccagctcctggtggacccatgtggaaatgggacctccagatcccattctgggagtcactgaagcctttaagagggacaccaatagcaaaaagatgaatctgggagttggtgcctaccgggatgataatggaaagccttacgttctgcctagcgtccgcaaggcagaggcccagattgccgcaaaaaatttggacaaggaatacctgcccattgggggactggctgaattttgcaaggcatctgcagaactagccctgggtgagaacagcgaagtcttgaagagtggccggtttgtcactgtgcagaccatttctggaactggagccttaaggatcggagccagttttctgcaaagattttttaagttcagccgagatgtctttctgcccaaaccaacctggggaaaccacacacccatcttcagggatgctggcatgcagctacaaggttatcggtattatgaccccaagacttgcggttttgacttcacaggcgctgtggaggatatttcaaaaataccagagcagagtgttcttcttctgcatgcctgcgcccacaatcccacgggagtggacccgcgtccggaacagtggaaggaaatagcaacagtggtgaagaaaaggaatctctttgcgttctttgacatggcctaccaaggctttgccagtggtgatggtgataaggatgcctgggctgtgcgccacttcatcgaacagggcattaatgtttgcctctgccaatcatatgccaagaacatgggcttatatggtgagcgtgtaggagccttcactatggtctgcaaagatgcggatgaagccaaaagggtagagtcacagttgaagatcttgatccgtcccatgtattccaaccctcccctcaatggggcccggattgctgctgccattctgaacaccccagatttgcgaaaacaatggctgcaagaagtgaaaggcatggctgaccgcatcattggcatgcggactcaactggtctccaacctcaagaaggagggttccacccacaattggcaacacatcaccgaccaaattggcatgttctgtttcacagggctaaagcctgaacaggtggagcggctgatcaaggagttctccatctacatgacaaaagatggccgcatctctgtggcaggggtcacctccagcaacgtgggctaccttgcccatgccattcaccaggtcaccaagtaatgtccctgggtcgaggaaacagagacaacctttctgtcttcagcctctgctattgagagcttcacacagacaatgagagagggtggatggtggtgagtggatcatttctttcagccacagtgtgtaacactcagcatttgaatgtttctcagaaaagaacatgtagtgacacagggcagaggcatccatggctggcgtctggaatattaaaccaaactctccccggtccttttttctccaacttttctcaaagagtttacatgtgcaagaaagtcatcgcaccaaaaaacctgtcaattatgccattgcaatatttcagaagctttaactgaagtgtcaggttcctcgtgagaaacaagcacaccttagaggctttgagagaaggccagctagttctgtcatgagtagtcggcctcgtgtctgtcctcccatcttggaacaaccttatcaacaggccgcactgcagaaatgatgttttatgaaaaccatgagctgctgccactccagcaagggaaataatgcagtttcctgtcttatttaagaaaaagagaaggctctcttttctcccttgtcattgccgttcttttccttacacgcaaaacatttttaactattgcagtttcatcccattctactgcttgattgaccatcaactccatcctatcgagattatttaagaatgaagaacataatttttctgctgatgccgtaccctcacccttttcagcaaagaatagtggagagtaggaaactgtactttatctcggcatcctcttgaatgatagtgcaagtttctccagttgggatgttgtctctgcccggttggacctcctccctttgttgaatgtggtgtgcagcctctcatctcacactgtgagtccagcggcgcagggtggtaccaggaaagaggatattctaggcttgcgtgctgctagctgggttcaggcttcacccactggaaagaaccaccatctgctctaaccatgtagacttattgcggcctggttttctctgttacaataaaattactgtagaccc

SEQ ID NO: 336 - DNA, 3513 bp, HOMO SAPIENS
acgcctggtgttctcgcgggaaagaaccgttgcgcccgactttgcgcggaggtaggagggggaagtggaggcgggagtgaagtctcgcgagaagagtcggttgccgtagcagagccctctagctgtgtgtgtctgaggctcggccgcctgagccgcggacggtttgctgagcccgttagtgcgcccggccgagacacgccgccgccatgtcccgctacctgcgtccccccaacacgtctctgttcgtcaggaacgtggccgacgacaccaggtctgaagacttgcggcgtgaatttggtcgttatggtcctatagttgatgtgtatgttccacttgatttctacactcgccgtccaagaggatttgcttatcacatttgaggatgttcgtgatgctgaagacgctttacataatttggacagaaagtggatttgtggacggcagattgaaatacagtttgcccagggggatcgaaagacaccaaatcagatgaaagccaaggaagggaggaatgtgtacagttcttcacgctatgatgattatgacagatacagacgttctagaagccgaagttatgaaaggaggagatcaagaagtcggtcttttgattacaactatagaagatcgtatagtcctagaaacagtagaccgactggaagaccacggcgtagcagaagccattccgacaatgatagattcaaacaccgaaatcgatctttttcaagatctaaatccaattcaagatcacggtccaagtcccagcccaagaaagaaatgaaggctaaatcacgttctaggtctgcatctcacaccaaaactagaggcacctctaaaacagattccaaaacacattataagtctggctcaagatatgaaaaggaatcaaggaaaaaagaaccacctagatccaaatctcagtcaagatcacagtctaggtctaggtcaaaatctagatcaaggtcttggactagtcctaagtccagtggccactgatagtataaaccatggtcatttttaggcatgtatcattcatttactcatagtttggtttacttaaattatcaggaatacaatgttgcaatgatgcttaaaaaacacttgttagttttccctgtaccaggcaatggttataattaaaatgatatgctgttgagaagccactcttaagagtccagtttgtttaatgttatgggcagctaccaatttgtggtgtctctgtatatttttgtaaagattctcattttttatgcttgaagtatttggtgaaaagatgttggttgaccataatttgcaacattgtctcattaaaaataaactttcatattcatatttggtagaactgttaacctagaaatgtagcttgctaataagatagaatgatacaaaagtgaagtagtagccacagtacaacactgactgctcagacacatttaggttcagggtggacctttatgtcttgtcaagatgtctaggcccggctgggcgtggtggctcacacctgtaatcccagcactttgggaggccgaggcgggcggatcacgaggtcaggagttcgagaccagcctgaccaacacggtgaaaccccgtctctactaaaaatacaaaaattatccgggcatggtggcacatgcctgtaatctcagctactcaggaggctgaggcaagagaatcgcttgaacctgggaggtagaagttgcagtgagccaaaatcacgccactgcactccagcctgggcaacagagtgagactccgtctcaaaaaaaaaaaaaaaaccggatgtctaggccaatgataattatttttgatgcagtgtggattagttcttttgttaaccccactgtcttggggaatgatgccagctgggaaattgagtttttgactgaaacatggagccttcactgctttttttctggttcctatgaagatttggaacatagaaaacacaaaaactcaccttaaaatttgagcaggtcgttgatggcaaaaataattttaaggaaaaaggaatattcttatgtagttattctaaagtttaaggagcgttgttgaccataatattgcttagttttcttactgctgttaagtaagtaaattgtttcaaagtaggttttgtgtgtgtgtgcctagtgtaaaagaactgaaattttgatgcttacagcacttggctcgtgcatttgtatcaaaatttgcctgcctctttatgagggaggcctgcttttcacacctcagtttatttaatacgaggcaagttgtaagacaacactcattctaggtgattctgtggtgccatgaaatttaaggtaatttggggaaaaggattagtcagttttaagcaagagtcacatcttttgagctttcgattatcagtgtagtacctgactaaaaatgaagtaatacccttaaaccatttataatttctagtatttctctgaaagatcgttttggggacaaaagtgacttgacatgtccaatttcatttcagaataaaaagctagcatctttaaaaatctcagattgcttgcttacagatacaagtaagaattatggacaaacgattccttttagaggattacttttttcaatttcggttttagtaatctaggctttgcctgtaaagaatacaacgatggattttaaatactgtttgtggaatgtgtttaaaggattgattctagaacctttgtatatttgatagtatttctaactttcatttctttactgtttgcagttaatgttcatgttctgctatgcaatcgtttatatgcacgtttctttaatttttttagattttcctggatgtatagtttaaacaacaaaaagtctatttaaaactgtagcagtagtttacagttctagcaaagaggaaagttgtggggttaaactttgtattttctttcttatagaggcttctaaaaaggtatttttatatgttctttttaacaaatattgtgtacaacctttaaaacatcaatgtttggatcaaaacaagacccagcttattttctgcttgctgtaaattaagcaaacatgctataataaaaacaaaatgaaggaaataatgattaactggaattattacagtattgaatatgattctaaaataacaatggaaacagtcctttatagatttaggaatattttaaatcattgttgcactaggcacaactaacttttactttggaaatgatagaacttgccagaaaggtacatcttttacacagtagttaaaaattcattgtgtaatatcaaagttgtttcatgattgctcattaagcctcttgggttaactaacttaagaggttatttggtagtgttaagatgaaatttggatcagctaattccaagtttatattttcattattggatggatcagtaattctgctctccctcttgtaaacaagacgcattagggcttaacgtttatgacatgattttaaatcattttaaattgaatgttgatgagcaactaatattaagtgataacctctttggggaagtaggttaggtattttg

SEQ ID NO: 337 - DNA, 3741 bp, HOMO SAPIENS
gcttggtgcgctctcacccttatctccaaattctgggtgttgtcgcgagggctgctgtgtccggaacttccggttccggtcagggtccgcgatctcggactaaggatgcggtcccgggttctgtggggcgctgcccggtggctctggccccgccgggccgttggcccagcccgccggcccctgagctccggtagcccgccgctggaggagctgttcacccggggcgggcccttgcggaccttcctcgagcgccaggcggggtctgaagcccatttgaaggtcaggaggcccgagttgctggcggtgatcaaactgctgaacgagaaggagcgggagctgcgggagactgagcacttgctgcacgatgagaatgaagatttaaggaaacttgcagagaatgaaatcactttgtgtcaaaaagaaataactcagctgaagcatcagattatcttacttttggttccctcagaagaaacagatgaaaatgatttgatcctggaagtaactgcaggagttggaggtcaggaggcaatgttgtttacatcagagatatttgatatgtatcagcaatatgctgcatttaaaagatggcattttgaaaccctggaatattttccaagtgaactaggtggccttagacatgcatctgccagcattgggggttcagaagcctataggcacatgaaatttgaaggaggtgttcacagagtacaaagagtgccaaagacagaaaagcaaggccgcgtccatactagcaccatgactgtagcaatattaccccagcctactgagattaatctggtgattaatccgaaagatttgagaattgacactaagcgagccagtggagctggggggcagcatgtaaataccacggacagtgctgtccggatagttcatcttccaacagattggaagtaaaggaagatcagagaaaataagaacatataattttccacagaaccgggtcacagatcacagaataaacaagacgctgcatgatcttgaaacttttatgcaaggagattatctactggatgaacttgtacagtcattgaaggaatacgccgattatgaatctttagtagaaattatttcccaaaaagtttaagttgatttgttatttatagactttcgtagcttagaaaaattctacagtacatccacatagggtgaaagtacccttactctcttgaaaaacgttgagttaacacagttggaggtaatatgcatattctgaagtcatagataatttacacagatctctctcaatgcattagcaaaaatcatacaatatacagatggtcctcgatttacattgtggttaattcccaataaacccatcataagttaaaaatgcatataacgttagcaacacagcagtctcctaattaatgacagcttgacttaacaattttccaactttaccatggtgtgaaagaggtatgattcctaagccctaaggagctcctcagcttgaaatggggctgcatccctataaacccatcataaagtcaaaaaatcctaaaacataagttggtgaccatctgtaatcatgatgtggtggtaaatcttggacgctaccttacaataactagacaaaggaaaatcatcctttgtcctgttctgtgtaaatatttaatgaatgatcaaaacttcagtttaaatattatgaaaaactttaaacataaagtagtagaaataagacagtaaatactgtatcctaatatccagtcaggatacagaaaccataccattaacttgaacagggataattttaatataaaaactgttaactgataatggtattaacttttaagagggatgaaagagagctatgatgtcctaggactgagagtaccccaggaaagaatacccttgaaagggtctccccttccccatggtgaagtcaggcctaatggagagagtggctacagcctactcagtgattgggaaattccctgtcttgccctgggccagagctggtgtaccgctggtggatcaggtcttacaagcaaagaacctcacactcccaactggtaagccagaagcctcttgctagggtgtgagcaaaacttggacaggaactctcagtagatgtttgtgtttgtcaagattctccagacaaacttccttaaaaggattggcttgtgttgttattattaagtctaacaagtccaaaagctggagtgtgaggcaggaggctggaaacccaggaaagctgatggtgcaaggtccagtccaaaggtatctgttggaggattctcttgttctgggaagaggacggtctttttttctcttcagaccttcacctgactggatcaagcccactaacatcgaggaggacagtctgcattactcagagttcactgattgatttaaatgtcaatctcatataaaacaccctcacagaaacacctagaataatgtttgaccttataattggaaaatcagagcaaaagttaaatctcaaaaaaaaaaaaaaaaaaagtatgacccagtagctaggcacctgtggccccgccaagttgacacataaaattaactgtcacagtatcatcttagaagtgaaagaagcccctttatcctgcagtgcccctctaccaccacctactgacaaagaacatggtgctatctggcatgggagaaatgttcagtttgctatggcttgtatgtgtcccctcaaattcaagtgttgccaatgtgacagcatcaagaggtggggtctttaagagatcactaggccatgagggattctcttaggactgggatgaaggcccataataaaagaggtttcggggagcatcctgctagcttgccttctgtatgtgagaacacagcaagaaagccctagtcaacaagtgccagctccttgatcttagacttcccatcctccagaactgtgagaaatacatttctgttccttacaaattacccagtctcctgtattctgttatagcagcacaaaatgaagataccatacctgaacacctgaacattcttcacaaggtagtaaatgcactgctttattctggtctcagtattgtgtgcttaataaggaaatgagaaagggtggatcagggcataggatgaacaagttactgctagacctctcacaatgccactaatggataagattgtattttcatcattcttgtctcttcggaagctaacaccatgctataataggcactaaatagatgtctaaaaacaccttaagtatttgtctagaaatctggtgcattgttcagaaagaaccaaaattcaaaataatttcaaagggcctaaagcactagttaatcaaaattcattagtttttaatggtactaccactctcaaatttaaaatgtcatcttacgttcctcttcctcgcattggatttattgctaaaacctggtaaacacttttaatccttttcaattccattaccactgctcttgtccagaattacttcgcagactaatagtcacctgacttctcccctgcatccgatttgctgtctaattctggttacaaataagtaactgccaaactaatctttctaaaaagcaagactgatctcgtcactcctttgctcaacaatgtaaaagctcccattgtctcccaaataaaaccagctttccactgtgtatacaatacatccatgatctgtatccagcatcattttgtattagctcactttatacaccaccccccatgccacatcaaattaaattatcctgataaatgcaactgcattta

SEQ ID NO: 338 - DNA, 1439 bp, HOMO SAPIENS
acgcggctgccggaagcgggtctggagcgggcgagacgaccagggccggcgagcgcagtgcagcgccgcgcggtgcgggcggccgagtgggggcgtcatggaggatgagcggagcttttcggatatctgcggcggccgcctggcgctgcagcgccgctactactccccgtcctgccgggaattctgcctcagctgccctcggctctcgctgcgttcgctcaccgctgtcacctgcacggtgtggctggcggcctacggactcttcaccctctgcgagaacagcatgatcctctctgctgccatcttcatcaccctcttaggtctgcttggttatctccattttgtgaagattgatcaggagactctgttaatcattgattcccttggcattcagatgacttcatcttatgcttcaggcaaagaaagcactaccttcatagaaatgggcaaggtcaaggatattgtcatcaatgaggccatttacatgcagaaggtgatttactacctctgcatcttattgaaagatccagtggaaccacatgggatatcccaagtagtacccgtcttccagagtgccaagccccggctggactgcttgattgaagtatacaggagctgccaggagatcctggcacaccagaaagccacatcaacaagcccatgagccccagcgttcagaaggccagcattgtcttccatgggagatgactcttaagccataggggctggttttccgtactccaaaccatcaggtggacacagtcctaggaaccattatggatgtagtgcatcttagagccatagagcaggtgactggaaatctaactcagtatatttccgtgtattatagtgttttccttgtaaggttttgcctactttaccaaaggaggggagaccttaagaattttgacacagtatgtcaaaagtaatgtcagcaaagaacactttcggaaattgctaagcatgttcaggtttactttgttgatgtttgtgaagcaaaacaatgggaaactgacatcagatgtcttgagaaagctatattttccaatagtaccccttgtgtaaagttacgaaaaaaacaagcccttcagtactggttagcaggaagaaatgtcctacaaaagacgagtctgtcaacctagtgcctgtgttctgtacagggcttatttatttactgttaataaacagatcttccaaaacacacagttacctggttcacagatagctgctttttattgacaaacaagatcatagtatttcagtcatggtgtcaagcacattaatacttttctgttactcagcatttttttttatatcagttcaaaagctacttttgccaagaaggatgagacaaaaggccagacagaaattggactttggttttcagacatgggactctcatgttaacaaagaataaataagcaaatattgaatcctta

SEQ ID NO: 339 - DNA, 557 bp, HOMO SAPIENS
gtttcccgcactgccggtatccgccgccatccggactcccgggtcctctgtgcaggttggaggatggttggttgtggcgagcgaggctgaaggagccgggacgcggggctctgggcctcgggaactgagccggtactcacctccgccccttctccccgtcgctgtccgcagccatggccctacgctaccctatggccgtgggcctcaacaagggccacaaagtgaccaagaacgtgagcaagcccaggcacagccgacgccgcgggcgtctgaccaaacacaccaagttcgtgcgggacatgattcgggaggtgtgtggctttgccccgtacgagcggcgcgccatggagttactgaaggtctccaaggacaaacgggccctcaaatttatcaagaaaagggtggggacgcacatccgcgccaagaggaagcgggaggagctgagcaacgtactggccgccatgaggaaagctgctgccaagaaagactgagcccctcccctgccctctccctgaaataaagaacagcttgacagaaaaaaaaaaaaaaaaaaaaaa

SEQ ID NO: 340 - DNA, 3149 bp, HOMO SAPIENS; identical to SEQ ID NO: 325

SEQ ID NO: 341 - DNA, 2926 bp, HOMO SAPIENS
tgggggcctagtggagtgaggggtaacaagatggcgaccgagacggtggagctccataagctaaagcttgccgaactaaagcaagaatgtcttgctcgtggtttggagaccaagggaataaagcaagatcttatccacagactccaggcatatcttgaagaacatgctgaagaggaggcaaatgaagaagatgtactgggagatgaaacagaggaagaagaaacaaagcccattgagctccctgtcaaagaggaagaaccccctgaaaaaactgttgatgtggcagcagagaagaaagtggtgaaaattacatctgaaataccacagactgagagaatgcagaagagggctgaacgattcaatgtacctgtgagcttggagagtaagaaagctgctcgggcagctaggtttgggatttcttcagttccaacaaaaggtctgtcatctgataacaaacctatggttaacttggataagctgaaggaaagagctcaaagatttggtttgaatgtctcttcaatctccagaaagtctgaagatgatgagaaactgaaaaagaggaaggagcgatttgggattgtcacaagttcagctggaactggaaccacagaggatacagaggcaaagaagaggaaaagagcagagcgctttgggattgcctgatgaaaagttcctgatactttctgttctccagtgttttccatttctctccttcttcttggtcacatatatgcctaaatgcacagtcatgtgcctacgtcctgcctcgcaatgagggagcatgtaccccaggttcaagtgctggattgtgtcatgtgaccatcccaaaactcagagcaccctatggccgtctttgccctctgtcacataacttgaaaactgcctgatggcctttttgcagtggttccctccaggaagccttgatctcagttgaagaagttctttcctggcattccaatgcccctgtcagctccatactcctcagacacccttaacaaaggctgtcatgcacacaatgtgacaaatacacaaaataaatgataattacactaataatgatatgttcagaggggcactggccaggtccacacacatcataaggtgggagggggtgctaactcccactgggttgctgagctgtgccccccaagtcccttcactctgtgcctctttgggggtagggaggaacaggggaatgagacttcagctcacagatttatgttcataagagaaagacccctgccccccccccacccaccacacacacacaaaggtctttatttggtggtatttaaggagctgtattctaagtgtcccccatatttaatgccccagctctctagaatctgtagagggaagatacctgatgcttattgcccaatccctactctgccaagatcacgaggcatttgaccttggagggaggtatctgttcttcacttctctgttcctttccttccaccaaggaaatgtgagtggtgttgatggccgggtgtgtcttgtccttcaggattggggcagaaggaaggatgaagaacagggccagagaggcttggggttagcatagctgctatatgggtgaaggcaagctgaagagcctaacagccctgcccattcctctactgaaagatcttgtttcactttctcactataagaataggaataagatgttaaagctcaccaacatcaccttctcaagggtggtcacatacctttgccccttccaccaactggccaagggggagagtcatgctcttgggaagaatgagccatccagttttgctcaccagcttgggctttactttagttcagtactgtttttatcagacccgtaactgctggctctacttagagtgacagttttgctgaagattcttacccccacctctcctgacatcctctaagctcttgcctggagccaagaggcctggtggtgaagtaaggatagggtgtggatcaggagattctcaactccttggcttctaggcactgtccagctgggaggcagaggggaacttgtactctgaagcctgtgactcctcttaagcctcacatctcttcaccactactctggtgccctggttatctgtcccacagcgagaggtattttatgtccataaagtgcccgtggtaagtgctcagaattcatctcttggctgtggcgggtgctgtcatttctcattccattgaggggaagaaactgaggcacagtgagtccagaggagaatgggtcagggttgtgggaggaatgaatgggcctagctagtgacttgaaatggcaaccagtctctgcctgcttcctagccttccaagcccgggagtctccatccttcccatcctctgttctaactggccttgtcagatgcttttccccactgtactttcccctccctgctgccaggtactgttagattccaaaaataaaaggaaaaaataattatacactctgcttccttgttctcccctcttccaccctgagctttggggttaggagactaaaatgtcccccttccagaatccttcccaccttggtctgctggctctattccctagcccagagcagtgatttggattcaaatgccctgtaaccttcagcctccttactgctcctttcttgacctctcctaacgctttccagacccaggggactctggggtctctatactctctctaattgacctgaagatagaggctgggagcagggccattccagaggctctttggtctctctcttggctgagggaatttgggcataagcaggctgcaccctctggctaaataactcagcatcatgagggtggacctgagggtttaaagtagctctcattatatagatcctggatgttgagggttctctctcccacccccgcatccccagctcttaaaccctaacctcttactatttccatgacaactggcttcaatt

SEQ ID NO: 342 - DNA, 2547 bp, HOMO SAPIENS
agcgggcgccggacgacctgtggcccaatggcggcggcgcgcgggcacgctgggggccggccagacgggccgacttttccagaagacccggatagttcctcccggccacgccgcgccggctctgggcactcagcatcgtttccttttcctccgctggagcagctatggcggcggtgaagaccctgaaccccaaggccgaggtggcccgagcgcaggcggcgctggcggtcaacatcagcgcagcgcggggtctgcaggacgtgctaaggaccaacctggggcccaagggcaccatgaagatgctcgtttctggcgctggagacatcaaacttactaaagacggcaatgtgctgcttcacgaaatgggccttcatcctagaataatcactgaaggatttgaagctgcaaaggaaaaggcccttcagtttttggaagaagtcaaagtaagcagagagatggacagggaaacacttatagatgtggccagaacatctcttcgtactaaagttcatgctgaacttgcagatgtcttaacagaggctgtagtggactccattttggccattaaaaagcaagatgaacctattgatctcttcatgattgagatcatggagatgaaacataaatctgaaactgatacaagcttaatcagagggcttgttttggaccacggagcacggcatcctgatatgaagaaaagggtggaggatgcatacatcctcacttgtaacgtgtcattagagtatgagaaaacagaagtgaattctggctttttttacaagagtgcagaagagagagaaaaactcgtgaaagctgaaagaaaattcattgaagatagggttaaaaaaataatagaactgaaaaggaaagtctgtggcgattcagataaaggatttgttgttattaatcaaaagggaattgaccccttttccttagatgctctttcaaaagaaggcatagttgctctgcgcagagctaaaaggagaaatatggagaggctgactcttgcttgtggtggggtagccctgaattcttttgacgacctaagtcctgactgcttgggacatgcaggacttgtatatgagtatacattgggagaagagaagtttacctttattgagaaatgtaacaaccctcgttctgtcacattattgatcaaaggaccaaataagcacacactcactcagatcaaagatgcagtgagggacggcttgagggctgtcaaaaatgctattgatgatggctgtgtggttccaggtgctggtgccgtggaagtggcaatggcagaagccctgattaaacataagcccagtgtaaagggcagggcacagcttggagtccaagcatttgctgatgcattgctcattattcccaaggttcttgctcagaactctggttttgaccttcaggaaacattagttaaaattcaagcagaacattcagaatcaggtcagcttgtgggtgtggacctgaacacaggtgagccaatggtggcagcagaagtaggcgtatgggataactattgtgtaaagaaacagcttcttcactcctgcactgtgattgccaccaacattctcttggttgatgagatcatgcgagctggaatgtcttctctgaaaggttgaattgaagcttcctctgtatctgaatcttgaagactgcaaagtgatcctgaggattacagctgtggaatttttgtccaagcttcaaataattttgaaagaaattttcccatatgaaaaaaggagagaacactggcatctgttgaaatttggaagttctgaaattatagtatttttaaaaattgcactgaagtgtatacacataaagcaggtcttttatccagtgaacaggatgttttgctttagcagcagtgacataaaattccatgttagataagcatatgttacttaccttgttattaaatatttcttgaaaagcaaattttaatggtttaattttatgtggacgtatgttaaattatccaactaccctattgttaagcatttggttttaaaatttttatgctaatataaatgctcaagtaatttaaaatattgaaagcatccctgttggtataaatttctgagtaaatgcattggatcagttggactttgaacgcctttgaaatggctttgctaaaatgctcccgccacaaagttgtaggaaatgggaagaggagtcaactagaggcaagggagttgagagagctgcaactgtaaagggcaagaacaggcagaggtaaaaagatgatggaaggtgtggtgactaagggccacggttattgggtgaaatttgagattgtaggccaactgtattttcaagcttctgaacttaggcaaaatattcatcgcaaagtctctagcgtcatatttttctcacccaaattacgtttccacgagattatttatatatagttggtctatctctgcagtccttgaaggtgaagttgtgtgttactaggctgtgttttgggatgtcagcagtggcctgaagtgagttgtgcaataaatgttaagttgaaacctcaaaaaaaaaaaaaaaaaa

SEQ ID NO: 343 - DNA, 7312 bp, HOMO SAPIENS
gtggcattgggaggcccggcctgggggaggagacggcgttccgttagcggcgttggggtttggctgcagtggcagtgctttctcttctgctcacggggacccgctcaggctggaggccagccagctcttgccgccacctcggtcgcgatgggggcgcaggaccggccgcagtgccacttcgacatcgagatcaaccgggagccggttggtcgcattatgtttcagctcttctcagacatatgtccaaaaacatgcaaaaacttcctttgcttgtgctcaggagagaaaggccttgggaaaacaactgggaagaagttatgttataaaggttctacgttccatcgtgtggttaaaaactttatgattcagggtggggacttcagtgaaggtaatggaaaaggtggagaatcaatttatggtggatattttaaagatgaaaactttattctcaaacatgacagagcgttccttttatcaatggcaaatcgagggaaacataccaatggttcccagtttttcattaccacaaagcctgctccacacctggatggggtgcatgtagtctttggactggttatttctggttttgaagtaatcgaacaaattgaaaatctgaagaccgatgctgcaagcagaccatatgcagatgtgcgagttattgactgtggagtacttgccacaaaatcaataaaagatgtttttgagaaaaaaaggaagaaaccaactcattcagaaggctcggattcctcttccaattcctcctcttcttcagaatcatcttcagaaagtgaacttgaacatgagagaagcagaaggaggaaacataagaggaggccaaaagttaaacgttctaaaaagaggcgaaaggaagcaagcagttcagaagagccaaggaataaacatgcaatgaacccaaaaggtcactctgagaggagtgataccaatgaaaaaaggtcagttgattccagtgctaaaagggaaaaacctgtggtccgcccagaagagattcctccagtgcctgagaaccgatttttactgagaagagatatgcctgttgttactgcagaacctgaaccgaagattcctgatgttgcacccattgtaagtgatcagaaaccatctgtatcaaagtctggacggaagattaaaggaaggggcacaattcgctatcacacacctccaagatcaagatcctgttctgagtcagatgatgatgacagcagtgaaactcctcctcactggaaagaggaaatgcagagattaagagcatatagaccacctagtggagaaaaatggagtaaaggagataagttaagtgacccctgttcaagccgatgggatgaaagaagcttgtctcagagatccagatcatggtcctataatggatattattcagaccttagtacagcaagacactctggccaccataaaaaacgcagaaaagaaaaaaaggttaagcataaaaagaaagggaaaaagcagaaacactgcagaagacacaaacaaacaaagaagagaaggattcttataccgtctgacatagaatcctcaaaatcttccactcgaagaatgaaatcctcttgtgatagagaaaggagttctcgttcttcctcattgtcatctcatcactcatcaaagagagactggtctaaatctgataaggatgtccagagctctttaacccattccagcagagactcatacagatcaaaatctcactcacagtcttattctagaggaagctcaagatcaaggactgcgtcaaagtcctcatcacattctcgaagtagatcaaagtccagatctagttccaagtctgggcaccgaaagagagcatcaaaatcaccaagaaaaacagcttctcagttaagtgaaaataaaccagttaaaacagaacctttaagagcaaccatggcacaaaatgaaaatgtagtagtacaaccagttgtagcagaaaatattcctgtaataccactgagtgacagtccccccccttcaagatggaagcctggacagaaaccttggaagccctcttatgagcgaattcaggaaatgaaagctaaaacaacccatttgctacccatccaaagcacttacagtttagcaaatattaaagagactggtagctcatcatcctaccataaaagagaaaaaaattcggaaagtgatcagagcacttattcaaaatacagtgatagaagttcagaaagctcaccaaggtcaaggagcagatcttctaggagtagatcttattccagatcatatacaagatcacgtagtctagctagttcacattcaaggtctaggtctccatcatctagatctcattcacgaaataaatacagtgatcattcacagtgtagtagatcatcttcatatacttctattagcagtgatgatggaaggcgagctaagaggagacttagatccagtgggaaaaaaaatagcgtttcacataaaaagcatagcagcagctctgaaaagacacttcacagtaaatatgtcaaaggtagagacaggtcttcatgtgtgagaaagtatagcgagagcagatcatctttagattattcttcagacagtgagcagtcaagtgttcaggccacacagtcagcccaggaaaaagagaagcagggccaaatggaaagaacacataataaacaagaaaaaaacagaggtgaagaaaaatccaagtctgaacgggaatgccctcattcaaaaaaaagaactttgaaagagaatctttctgatcaccttagaaatggcagtaagcccaaaaggaagaattatgctggtagtaaatgggactctgagtcaaattcagaacgagatgtcactaaaaacagtaaaaatgactcccatccatcctctgacaaggaagaaggtgaggccacatccgattctgaatcagaggttagtgaaattcacatcaaagtcaaacccacaaccaagtcgtccacaaatacttcactgcctgatgataatggtgcttggaaatcaagcaaacagcgcacatcaacttctgactctgaggggtcctgttccaattcggaaaacaataggggaaagccacaaaagcacaaacatgggtcaaaggaaaatcttaaaagagaacacaccaaaaaagtgaaagagaaattgaaagggaaaaaagacaaaaagcataaggctccaaaacgaaagcaagcatttcactggcagcctccactagaatttggtgaagaggaggaggaggagattgatgacaagcaagttactcaggaatcaaaagagaaaaaagtttctgaaaacaatgaaaccataaaagataatattctaaaaactgagaaatccagtgaagaggacctttcaggtaaacatgatacagtgactgtttcatcagatcttgatcagtttactaaagatgatagtaaactcagtatttctcccacagctttaaatactgaggaaaatgtggcctgtttacaaaacattcagcacgttgaagaaagtgttcccaatggagtggaagatgtgcttcaaacagatgacaacatggagatctgcactcctgataggagttccccagcaaaagtagaggagacttcccctctaggaaatgcacggcttgataccccagatataaacattgttttgaagcaggatatggcaacggaacatcctcaagcagaggtagtaaaacaggaaagcagcatgtccgaaagtaaagtgttgggtgaagtggggaaacaggacagcagctctgctagcttggctagtgctggagaaagtaccgggaagaaggaggtggctgagaagagccagatcaacctcattgataagaaatggaagcccctgcaaggtgtggggaacctggcagcacctaatgctgccacatccagtgctgtggaagttaaggtgttgaccactgtgcctgaaatgaaaccacaaggcttgagaatagaaattaaaagcaaaaataaagttcggcctgggtctctctttgatgaagtaagaaagacagcacgcttaaaccgtagaccaagaaatcaggagagttcaagtgatgagcagacgcctagtcgggatgatgatagccagtccaggagtccaagtagatctcgaagtaaatctgaaaccaaatcaagacacagaacaaggtctgtctcctatagtcactcaagaagtcgatcgagaagttccacatcatcttatcgatcaagaagctactctagaagtcggagcagaggatggtacagcagaggccgaaccagaagccggagcagttcctaccggagttacaaaagtcacaggacgtccagcaggagcagatccaggagcagctcatatgatccccacagtcgatccaggtcctacacctacgatagctactatagcaggagtcggagtcgaagtagaagccagagaagtgacagttaccaccgaggcagaagttataatcggcggtccaggagttgtagatcttatggctctgacagtgaaagtgaccgaagttactctcatcaccggagccccagtgagagcagcagatacagttgaaaacgtccggatacaaattatatcttatttgtaaatatctggcaacttagcttaagaaatgtaatgacagtctgttgttctatttcaatatcagaggtgaatttcaaaaatagacacttcttaattgttactggttcatttacatgtggggagaagaatttaaaatacagatatgtctcctaaaaatatttttatgccacattttacagtagccaactatggaaatgaatttcattttcttgaatcaagaaatcgtgaaatttatctatgtataatttgcaatattattttaagtctatttcactctatcttacgtatcccttagaatacagattctttttgcctgtttttccagttttagcatatatgctgccaagcatagaactgtgaaggagaactgttaaaggcggccaaatatttatatactgattacatagagtcttgtacatatgtgctctaaaaacaaaccacccagaattgatactgttggtaaccaggagtataaggcagtggctctggggttcttaattcattcctaacttctttgatacttcacaggattaggaaagtggtcatcatacatcccacacagtctgtattacttcaggcttgtgggcaaggttaggaagaatcaatcagccttaactataaatacctgcactgtctctgaggacttactattttatgttctttttaatcaataccgatcagaagtttaggttataaaaacaattctacttcatgctttggtgcttggtaatttttggtgcgtctttaagcattactcttatatatcatatattaaaataccataaaaatgaaattcagacaaaatcactggcaccaaaaatggtttattctgagctgtcttcactttgactatttggggggcttctctcaagtacagatgtgggttggggtcccctggagcaggcaggattggcagtaagagatattggccactcaagtctactgtgtgtgtgtgcctctggaagagtgaagaatggacttcaaaagtaacatcaaaaatctaactgccaccatcctggagacattttgcagggctttcctttcaagtctttcaagtacaggatattaccacaacagcagctgaactgttgtaaccagcatgtttttcctatttccactgtgacctgcagctgactcaaagccttgcgtgacctgacccaggtgcaagagacaggggaagagggatagagggtatagcataaattacatattttcatggctttgggtggttcctccaaaaataattggacctgtaaaaactagtgtgtgtgtgtgtgtgtgtgtgtgtgtgtgtgtggtttttttttttaatctttactttgaatttgttccccaagtgtacttaatcaccttagtgccagtttaatccagttatgcagaagaaattcatattggttgcctgatgtagagctcagcaccaccctaccacaggccttgtctggtgtatttgggaagtggaaaagagccctcagttggagggagctgacaacccttggtggagggagggtgcccttgaatgtattaaaactatcacccaaagaaggtatgaaaacagggtaaggtggtcagttgtttgccaggtcaatagacagaaagtacattagaaaacaggacttaggccaaacaaacaatactggatactgaatacaaaacagtatgatttatattaaaggtttccaaaggttgcctgcaaaggagaatattactactagtcagcaggaaaaaaatgcattcagaacccaagcagaaactgccaaatgtaattaggttaagaaaagttacccttgggcagtgtattagttttctattgctgtgtgacaaattaccccaaatttagcagtttaaaaaacaatacccatagcagttctgtagctcatgagtctggcacagtgtggctggattctctgctcagggtcttaaaggctgaaataagggttggcaggacaacattccttcatggaggctctggggaagaatctgcttctaagttcattcaggttgttggcggaattcagttctttgctggctctcagctggaggcccctctctcacctcaaggctgcctgcattccttcttatgtggtcccctccagcttcaaaccagccttcctgctctttctcatgcttcatatctctctcccgtcctcctgttttaggggcatatgattagctcaagcccacagatatattttaaggttgattgtgcgatagaacataattgcaggagtactgtctcatctcatcatattcacgggttctggagattagctcattgaaagtgggaggggcattttcaaattctgcctaccacaggcaataactgcccatctcagctgtaggtggaatttttacccagaaaagataggccctagaagcctcatttcttttctccatggaaaaggacagccctctgctgcagcgttcaacttgtgtgtttactgacagagtgaactacagaaatagcttttcttcctaaaggggattgttctacattttgaagttattttttaataaaattgaattatgttgtgtattgtgcttcttaataggaaatgcattattggactgtttttgtaacatcctgtttattgcaaatagctagtatcgttcaaaaactgtataaaatacttttgtacatattagcaatgtctaatttgtatacacttcagttaaatttccctaaaacttgaaaggggaccttgtagaaattaaaatatatacttagtctaagtctgaaaaaaaaaaa

SEQ ID NO: 344 - DNA, 1820 bp, HOMO SAPIENS
gcggcgacgacggcggcggcagcgctccaactggctcctcgctccgggctccgccgtcgagccgggagagagcctccgccagcggccaggcaccagccagacgacgccagcgaccccggcctctcggcggcaccgcgctaactcaggggctgcataggcacccagagccgaactccaagatgggaggcaagctcagcaagaagaagaagggctacaatgtgaacgacgagaaagccaaggagaaagacaagaaggccgagggcgcggcgacggaagaggaggggaccccgaaggagagtgagccccaggcggccgcagagcccgccgaggccaaggagggcaaggagaagcccgaccaggacgccgagggcaaggccgaggagaaggagggcgagaaggacgcggcggctgccaaggaggaggccccgaaggcggagcccgagaagacggagggcgcggcagaggccaaggctgagcccccgaaggcgcccgagcaggagcaggcggcccccggccccgctgcgggcggcgaggcccccaaagctgctgaggccgccgcggccccggccgagagcgcggcccctgccgccggggaggagcccagcaaggaggaaggggaacccaaaaagactgaggcgcccgcagctcctgccgcccaggagaccaaaagtgacggggccccagcttcagactcaaaacccggcagctcggaggctgccccctcttccaaggagacccccgcagccacggaagcgcctagttccacacccaaggcccagggccccgcagcctctgcagaagagcccaagccggtggaggccccggcagctaattccgaccaaaccgtaaccgtgaaagagtgacaaggacagcctataggaaaaacaataccacttaaaacaatctcctctctctctctctctctctctctctatctctctctctatctcctctctctctctcctctcctatctctcctctctctctctcctatactaacttgtttcaaattggaagtaatgatatgtattgcccaaggaaaaatacaggatgttgtcccatcaagggagggagggggtgggagaatccaaatagtatttttgtggggaaatatctaatataccttcagtcaactttaccaagaagtcctggatttccaagatccgcgtctgaaagtgcagtacatcgtttgtacctgaaactgccgccacatgcactcctccaccgctgagagttgaatagcttttcttctgcaatgggagttgggagtgatgcgtttgattctgcccacagggcctgtgccaaggcaatcagatctttatgagagcagtattttctgtgttttctttttaatttacagcctttcttattttgatatttttttaatgttgtggatgaatgccagctttcagacagagcccacttagcttgtccacatggatctcaatgccaatcctccattcttcctctccagatatttttgggagtgacaaacattctctcatcctacttagcctacctagatttctcatgacgagttaatgcatgtccgtggttgggtgcacctgtagttctgtttattggtcagtggaaatgaaaaaaaaaaaaaaaaaaagtctgcgttcattgcagttccagtttctcttccattctgtgtcacagacaccaacacaccactcattggaaaatggaaaaaaaaaacaaaaaaaaaacaaaaaaatgtacaatggatgcattgaaattatatgtaattgtataaatggtgcaacagtaataaagttaaacaattaaaaagaaaaaaaaaaaaaaaaaaaaaaaaa

SEQ ID NO: 345 - DNA, 2966 bp, HOMO SAPIENS
cgcccgagccgcgcgcggagctgccgggggctccttagcacccgggcgccggggccctcgcccttccgcagccttcactccagccctctgctcccgcacgccatgaagtcgccgttctaccgctgccagaacaccacctctgtggaaaaaggcaactcggcggtgatgggcggggtgctcttcagcaccggcctcctgggcaacctgctggccctggggctgctggcgcgctcggggctggggtggtgctcgcggcgtccactgcgcccgctgccctcggtcttctacatgctggtgtgtggcctgacggtcaccgacttgctgggcaagtgcctcctaagcccggtggtgctggctgcctacgctcagaaccggagtctgcgggtgcttgcgcccgcattggacaactcgttgtgccaagccttcgccttcttcatgtccttctttgggctctcctcgacactgcaactcctggccatggcactggagtgctggctctccctagggcaccctttcttctaccgacggcacatcaccctgcgcctgggcgcactggtggccccggtggtgagcgccttctccctggctttctgcgcgctacctttcatgggcttcgggaagttcgtgcagtactgccccggcacctggtgctttatccagatggtccacgaggagggctcgctgtcggtgctggggtactctgtgctctactccagcctcatggcgctgctggtcctcgccaccgtgctgtgcaacctcggcgccatgcgcaacctctatgcgatgcaccggcggctgcagcggcacccgcgctcctgcaccagggactgtgccgagccgcgcgcggacgggagggaagcgtcccctcagcccctggaggagctggatcacctcctgctgctggcgctgatgaccgtgctcttcactatgtgttctctgcccgtaatttatcgcgcttactatggagcatttaaggatgtcaaggagaaaaacaggacctctgaagaagcagaagacctccgagccttgcgatttctatctgtgatttcaattgtggacccttggatttttatcattttcagatctccagtatttcggatattttttcacaagattttcattagacctcttaggtacaggagccggtgcagcaattccactaacatggaatccagtctgtgacagtgtttttcactctgtggtaagctgaggaatatgtcacattttcagtcaaagaaccatgattaaaaaaaaaaagacaacttacaatttaaatccttaaaagttacctcccataacaaaagcatgtatatgtattttcaaaagtatttgatatcttaacaatgtgttaccattctatagtcatgaaccccttcagtgcattttcatttttttattaacagcaactaaaattttatatattgtaaccagtgttaaaagtcttaaaaaacaatggtattaattgtccctacatttgtgcttggtggccctattttttttttttagagaggccttgagacatacaggtcttttaaaatacagtagaaacaccactgtttacgattatacgatggacattcataaaaagcataatttcttaccctattcattttttggtgaaacctgattcattgattttatatcattgccgatgtttagttcatttctttgccaattgatctaagcatagcctgaattatgatgttcctcagagaagtgaggtgggaaatatgaccaggtcaggcagttggaggggcttccccagccaccatcggggagtacttgctgcctcaggtggagacctgaagctgtaactagatgcagagcaagatatgactatagcccacaacccaaagaagcaaaaattcgtttttatcttttgaaatccagtttcttttgtattgagtcaagggtgtcagtaggaatcaaaagttgggggtgggttgcaaaatgttctttcagtttttagaacctccattttataaaagaattatcctatcaatggattctttagtggaaggatttatgcttctttgaaaaccagtgtgtgactcactgtagagccatgtttactgtttgactgtgtggcacaggggggcatttggcacagcaaaaagcccacccaggacttagcctcagttgacgatagtaacaatggccttaacatctaccttaacagctacctattacagccgtattctgctgtccgtggagacggtaagatcttaggttccaagattttacttcaaattacaccttcaaaactggagcagcatatagccgaaaaggagcacaactgagcactttaatagtaatttaaaagttttcaagggtcagcaatatgatgactgaaagggaaaagtggaggaaacgcagctgcaactgaagcggagactctaaacccagcttgcaggtaagagctttcacctttggtaaaagaacagctggggaggttcaaggggtttcagcatctctggagttcctttgtatctgacaatctcaggactccaaggtgcaaagcctgctgcatttgcgtgatctcaagacctccagccagaagtcccttccaaatataagagtactcatgtttatttatttccaactgagcagcaacctcctttgtttcacttatgttttttccagtatctgagataatataaagctgggtaattttttatgtaattttttggtatagcaaaactgtgaaaaagccaaattaggcatacaaggagtatgatttaacagtatgacatgatgaaaaaaatacagttgtttttgaaatttaacttttgtttgtaccttcaatgtgtaagtacatgcatgttttattgtcagaggaagaacatgttttttgtattctttttttggagaggtgtgttaggataattgtccagttaatttgaaaaggccccagatgaatcaataaatataattttatagtaaaaaaaaaaaaaaaaaaaaaaaaa

SEQ ID NO: 346 - DNA, 3739 bp, HOMO SAPIENS
atgaatttacaaccaattttctggattggactgatcagttcagtttgctgtgtgtttgctcaaacagatgaaaatagatgtttaaaagcaaatgccaaatcatgtggagaatgtatacaagcagggccaaattgtgggtggtgcacaaattcaacatttttacaggaaggaatgcctacttctgcacgatgtgatgatttagaagccttaaaaaagaagggttgccctccagatgacatagaaaatcccagaggctccaaagatataaagaaaaataaaaatgtaaccaaccgtagcaaaggaacagcagagaagctcaagccagaggatattactcagatccaaccacagcagttggttttgcgattaagatcaggggagccacagacatttacattaaaattcaagagagctgaagactatcccattgacctctactaccttatggacctgtcttactcaatgaaagacgatttggagaatgtaaaaagtcttggaacagatctgatgaatgaaatgaggaggattacttcggacttcagaattggatttggctcatttgtggaaaagactgtgatgccttacattagcacaacaccagctaagctcaggaacccttgcacaagtgaacagaactgcaccagcccatttagctacaaaaatgtgctcagtcttactaataaaggagaagtatttaatgaacttgttggaaaacagcgcatatctggaaatttggattctccagaaggtggtttcgatgccatcatgcaagttgcagtttgtggatcactgattggctggaggaatgttacacggctgctggtgttttccacagatgccgggtttcactttgctggagatgggaaacttggtggcattgttttaccaaatgatggacaatgtcacctggaaaataatatgtacacaatgagccattattatgattatccttctattgctcaccttgtccagaaactgagtgaaaataatattcagacaatttttgcagttactgaagaatttcagcctgtttacaaggagctgaaaaacttgatccctaagtcagcagtaggaacattatctgcaaattctagcaatgtaattcagttgatcattgatgcatacaattccctttcctcagaagtcattttggaaaacggcaaattgtcagaaggcgtaacaataagttacaaatcttactgcaagaacggggtgaatggaacaggggaaaatggaagaaaatgttccaatatttccattggagatgaggttcaatttgaaattagcataacttcaaataagtgtccaaaaaaggattctgacagctttaaaattaggcctctgggctttacggaggaagtagaggttattcttcagtacatctgtgaatgtgaatgccaaagcgaaggcatccctgaaagtcccaagtgtcatgaaggaaatgggacatttgagtgtggcgcgtgcaggtgcaatgaagggcgtgttggtagacattgtgaatgcagcacagatgaagttaacagtgaagacatggatgcttactgcaggaaagaaaacagttcagaaatctgcagtaacaatggagagtgcgtctgcggacagtgtgtttgtaggaagagggataatacaaatgaaatttattctggcaaattctgcgagtgtgataatttcaactgtgatagatccaatggcttaatttgtggaggaaatggtgtttgcaagtgtcgtgtgtgtgagtgcaaccccaactacactggcagtgcatgtgactgttctttggatactagtacttgtgaagccagcaacggacagatctgcaatggccggggcatctgcgagtgtggtgtctgtaagtgtacagatccgaagtttcaagggcaaacgtgtgagatgtgtcagacctgccttggtgtctgtgctgagcataaagaatgtgttcagtgcagagccttcaataaaggagaaaagaaagacacatgcacacaggaatgttcctattttaacattaccaaggtagaaagtcgggacaaattaccccagccggtccaacctgatcctgtgtcccattgtaaggagaaggatgttgacgactgttggttctattttacgtattcagtgaatgggaacaacgaggtcatggttcatgttgtggagaatccagagtgtcccactggtccagacatcattccaattgtagctggtgtggttgctggaattgttcttattggccttgcattactgctgatatggaagcttttaatgataattcatgacagaagggagtttgctaaatttgaaaaggagaaaatgaatgccaaatgggacacgcaagaaaatccgatttacaagagtcctattaataatttcaagaatccaaactacggacgtaaagctggtctctaaattgccggtgaaaatcctatttataagagtgccgtaacaactgtggtcaatccgaagtatgagggaaaatgagtactgcccgtgcaaatcccacaacactgaatgcaaagtagcaatttccatagtcacagttaggtagctttagggcaatattgccatggttttactcatgtgcaggttttgaaaatgtacaatatgtataatttttaaaatgttttattattttgaaaataatgttgtaattcatgccagggactgacaaaagacttgagacaggatggttactcttgtcagctaaggtcacattgtgcctttttgaccttttcttcctggactattgaaatcaagcttattggattaagtgatatttctatagcgattgaaagggcaatagttaaagtaatgagcatgatgagagtttctgttaatcatgtattaaaactgatttttagctttacaaatatgtcagtttgcagttatgcagaatccaaagtaaatgtcctgctagctagttaaggattgttttaaatctgttattttgctatttgcctgttagacatgactgatgacatatctgaaagacaagtatgttgagagttgctggtgtaaaatacgtttgaaatagttgatctacaaaggccatgggaaaaattcagagagttaggaaggaaaaaccaatagctttaaaacctgtgtgccattttaagagttacttaatgtttggtaacttttatgccttcactttacaaattcaagccttagataaaagaaccgagcaattttctgctaaaaagtccttgatttagcactatttacatacaggccatactttacaaagtatttgctgaatggggaccttttgagttgaatttattttattatttttattttgtttaatgtctggtgctttctgtcacctcttctaatcttttaatgtatttgtttgcaattttggggtaagactttttttatgagtactttttctttgaagttttagcggtcaatttgcctttttaatgaacatgtgaagttatactgtggctatgcaacagctctcacctacgcgagtcttactttgagttagtgccataacagaccactgtatgtttacttctcaccatttgagttgcccatcttgtttcacactagtcacattcttgttttaagtgcctttagttttaacagttcactttttacagtgctatttactgaagttatttattaaatatgcctaaaatacttaaatcggatgtcttgactctgatgtattttatcaggttgtgtgcatgaaatttttatagattaaagaagttgaggaaaagcaaaaaaaaaa

SEQ ID NO: 347 - DNA, 2492 bp, HOMO SAPIENS
gggagcgcggcgcggccgccgcgtgcgcgagccggggttgcagcccagccgggactttccagccggcggcagccgcggcggccgccggctcttccccgccccccgtcatggggcagcccggggagcagaacgctgcggaccgcggcggaggacgcgcccggcgcccctgagccggccgagcggcgacggaccgcgagatgaggaaaatgaggcccaaagaagtgatgccacttggttaaggtcccagagcaggtcagaatcagacctaggatcagaaacctggctcctggctcctggctccctactcttctaaggatcgctgtcctgacagaagagaactcctctttcctaaaatggagtcgagtaaaaagatggactctcctggcgcgctgcagactaacccgccgctaaagctgcacactgaccgcagtgctgggacgccagtttttgtccctgaacaaggaggttacaaggaaaagtttgtgaagaccgtggaggacaagtacaagtgtgagaagtgccacctggtgctgtgcagcccgaagcagaccgagtgtgggcaccgcttctgcgagagctgcatggcggccctgctgagctcttcaagtccaaaatgtacagcgtgtcaagagagcatcgttaaagataaggtgtttaaggataattgctgcaagagagaaattctggctcttcagatctattgtcggaatgaaagcagaggttgtgcagagcagttaatgctgggacatctgctggtgcatttaaaaaatgattgccattttgaagaacttccatgtgtgcgtcctgactgcaaagaaaaggtcttgaggaaagacctgcgagaccacgtggagaaggcgtgtaaataccgggaagccacatgcagccactgcaagagtcaggttccgatgatcgcgctgcagaaacacgaagacaccgactgtccctgcgtggtggtgtcctgccctcacaagtgcagcgtccagactctcctgaggagcgaggggacaaaccagcagatcaaggcccacgaggccagctccgccgtgcagcacgtcaacctgctgaaggagtggagcaactcgctcgaaaagaaggtttccttgttgcagaatgaaagtgtagaaaaaaacaagagcatacaaagtttgcacaatcagatatgtagctttgaaattgaaattgagagacaaaaggaaatgcttcgaaataatgaatccaaaatccttcatttacagcgagtgatagacagccaagcagagaaactgaaggagcttgacaaggagatccggcccttccggcagaactgggaggaagcagacagcatgaagagcagcgtggagtccctccagaaccgcgtgaccgagctggagagcgtggacaagagcgcggggcaagtggctcggaacacaggcctgctggagtcccagctgagccggcatgaccagatgctgagtgtgcacgacatccgcctagccgacatggacctgcgcttccaggtcctggagaccgccagctacaatggagtgctcatctggaagattcgcgactacaagcggcggaagcaggaggccgtcatggggaagaccctgtccctttacagccagcctttctacactggttactttggctataagatgtgtgccagggtctacctgaacggggacgggatggggaaggggacgcacttgtcgctgttttttgtcatcatgcgtggagaatatgatgccctgcttccttggccgtttaagcagaaagtgacactcatgctgatggatcaggggtcctctcgacgtcatttgggagatgcattcaagcccgaccccaacagcagcagcttcaagaagcccactggagagatgaatatcgcctctggctgcccagtctttgtggcccaaactgttctagaaaatgggacatatattaaagatgatacaatttttattaaagtcatagtggatacttcggatctgcccgatccctgataagtagctggggaggtggatttagcagaaggcaactcctctgggggatttgaaccggtctgtcttcactgaggtcctcgcgctcagaaaaggaccttgtgagacggaggaagcggcagaaggcggacgcgtgccggcgggaggagccacgcgtgagcacacctgacacgttttataatagactagccacacttcactctgaagaattatttatccttcaacaagataaatattgctgtcagagaaggttttcattttcatttttaaagatctagttaattaaggtggaaaacatatatgctaaacaaaagaaacatgatttttcttccttaaacttgaacaccaaaaaaacacacacacacacacacgtggggatagctggacatgtcagcatgttaagtaaaaggagaatttatgaaatagtaatgcaattctgatatcttctttctaaaattcaagagtgcaattttgtttcaaatacagtatattgtctatttttaaggcctc

SEQ ID NO: 348 - DNA, 3003 bp, HOMO SAPIENS
ctttctccttccccttcttccgggctcccgtcccggctcatcacccggcctgtggcccactcccaccgccagctggaaccctggggactacgacgtccctcaaaccttgcttctaggagataaaaagaacatccagtcatggataaaaatgagctggttcagaaggccaaactggccgagcaggctgagcgatatgatgacatggcagcctgcatgaagtctgtaactgagcaaggagctgaattatccaatgaggagaggaatcttctctcagttgcttataaaaatgttgtaggagcccgtaggtcatcttggagggtcgtctcaagtattgaacaaaagacggaaggtgctgagaaaaaacagcagatggctcgagaatacagagagaaaattgagacggagctaagagatatctgcaatgatgtactgtctcttttggaaaagttcttgatccccaatgcttcacaagcagagagcaaagtcttctatttgaaaatgaaaggagattactaccgttacttggctgaggttgccgctggtgatgacaagaaagggattgtcgatcagtcacaacaagcataccaagaagcttttgaaatcagcaaaaaggaaatgcaaccaacacatcctatcagactgggtctggcccttaacttctctgtgttctattatgagattctgaactccccagagaaagcctgctctcttgcaaagacagcttttgatgaagccattgctgaacttgatacattaagtgaagagtcatacaaagacagcacgctaataatgcaattactgagagacaacttgacattgtggacatcggatacccaaggagacgaagctgaagcaggagaaggaggggaaaattaaccggccttccaacttttgtctgcctcattctaaaatttacacagtagaccatttgtcatccatgctgtcccacaaatagttttttgtttacgatttatgacaggtttatgttacttctatttgaatttctatatttcccatgtggtttttatgtttaatattaggggagtagagccagttaacatttagggagttatctgttttcatcttgaggtggccaatatggggatgtggaatttttatacaagttataagtgtttggcatagtacttttggtacattgtggcttcaaaagggccagtgtaaaactgcttccatgtctaagcaaagaaaactgcctacatactggtttgtcctggcggggaataaaagggatcattggttccagtcacaggtgtagtaattgtgggtactttaaggtttggagcacttacaaggctgtggtagaatcataccccatggataccacatattaaaccatgtatatctgtggaatactcaatgtgtacacctttgactacagctgcagaagtgttcctttagacaaagttgtgacccattttactctggataagggcagaaacggttcacattccattatttgtaaagttacctgctgttagctttcattatttttgctacactcattttatttgtatttaaatgttttaggcaacctaagaacaaatgtaaaagtaaagatgcaggaaaaatgaattgcttggtattcattacttcatgtatatcaagcacagcagtaaaacaaaaacccatgtatttaacttttttttaggatttttgcttttgtgatttttttttttttgatacttgcctaacatgcatgtgctgtaaaaatagttaacagggaaataacttgagatgatggctagctttgtttaatgtcttatgaaattttcatgaacaatccaagcataattgttaagaacacgtgtattaaattcatgtaagtggaataaaagttttatgaatggacttttcaactactttctctacagcttttcatgtaaattagtcttggttctgaaacttctctaaaggaaattgtacattttttgaaatttattccttattccctcttggcagctaatgggctcttaccaagtttaaacacaaaatttatcataacaaaaatactactaatataactactgtttccatgtcccatgatcccctctcttcctccccaccctgaaaaaaatgagttcctattttttctgggagagggggggattgattagaaaaaaatgtagtgtgttccatttaaaattttggcatatggcattttctaacttaggaagccacaatgttcttggcccatcatgacattgggtagcattaactgtaagttttgtgcttccaaatcactttttggtttttaagaatttcttgatactcttatagcctgccttcaattttgatcctttattctttctatttgtcaggtgcacaagattaccttcctgttttagccttctgtcttgtcaccaaccattcttacttggtggccatgtacttggaaaaaggccgcatgatctttctggctccactcagtgtctaaggcaccctgcttcctttgcttgcatcccacagactatttccctcatcctatttactgcagcaaatctctccttagttgatgagactgtgtttatctccctttaaaaccctacctatcctgaatggtctgtcattgtctgcctttaaaatccttcctctttcttcctcctctattctctaaataatgatggggctaagttatacccaaagctcactttacaaaatatttcctcagtactttgcagaaaacaccaaacaaaaatgccattttaaaaaaggtgtattttttcttttagaatgtaagctcctcaagagcagggacaatgttttctgtatgttctattgtgcctagtacactgtaaatgctcaataaatattgatgatgggaggcagtgagtcttgatgataagggtgagaaactgaaatcccaaacactgttttgttgcttgttttattatgacctcagattaaattgggaaatattggcccttttgaataattgtcccaaatattacattcaaataaaagtgcaatggagaaaaaaaaaaa

SEQ ID NO: 349 - DNA, 1096 bp, HOMO SAPIENS
gaattcattagccatggatgtattcatgaaaggactttcaaaggccaaggagggagttgtggctgctgctgagaaaaccaaacagggtgtggcagaagcagcaggaaagacaaaagagggtgttctctatgtaggctccaaaaccaaggagggagtggtgcatggtgtggcaacagtggctgagaagaccaaagagcaagtgacaaatgttggaggagcagtggtgacgggtgtgacagcagtagcccagaagacagtggagggagcagggagcattgcagcagccactggctttgtcaaaaaggaccagttgggcaaggaagggtatcaagactacgaacctgaagcctaagaaatatctttgctcccagtttcttgagatctgctgacagatgttccatcctgtacaagtgctcagttccaatgtgcccagtcatgacatttctcaaagtttttacagtgtatctcgaagtcttccatcagcagtgattgaagtatctgtacctgcccccactcagcatttcggtgcttccctttcactgaagtgaatacatggtagcagggtctttgtgtgctgtggattttgtggcttcaatctacgatgttaaaacaaattaaaaacacctaagtgactaccacttatttctaaatcctcactatttttttgttgctgttgttcagaagttgttagtgatttgctatcatatattataagatttttaggtgtcttttaatgatactgtctaagaataatgacgtattgtgaaatttgttaatatatataatacttaaaaatatgtgagcatgaaactatgcacctataaatactaaatatgaaattttaccattttgcgatgtgttttattcacttgtgtttgtatataaatggtgagaattaaaataaaacgttatctcattgcaaaaatattttatttttatcccatctcactttaataataaaaatcatgcttataagcaacatgaattaagaactgacacaaaggacaaaaatataaagttattaatagccatttgaagaaggaggaattttagaagaggtagagaaaatggaacattaaccctacactcggaattc

SEQ ID NO: 350 - DNA, 1772 bp, HOMO SAPIENS
ggataaatgtagcgccgcggcgcgggccagcagctctgcgaggggccggagcgcggcggagccatgcagtacccgcaccccgggccggcggcgggcgccgtgggggtgccgctgtacgcgcccacgccgctgctgcaacccgcacacccgacgcccttttacatcgaggacatcctgggccgcgggcccgccgcgcccacgcccgcccccacgctgccgtcccccaactcctccttcaccagcctcgtgtccccctaccggaccccggtgtacgagcccacgccgatccatccagccttctcgcaccactccgccgccgcgctggccgctgcctacggacccggcggcttcgggggccctctgtaccccttcccgcggacggtgaacgactacacgcacgccctgctccgccacgaccccctgggcaaacctctactctggagccccttcttgcagaggcctctgcataaaaggaaaggcggccaggtgagattctccaacgaccagaccatcgagctggagaagaaattcgagacgcagaaatatctctctccgcccgagaggaagcgtctggccaagatgctgcagctcagcgagagacaggtcaaaacctggtttcagaatcgacgcgctaaatggaggagactaaaacaggagaaccctcaaagcaataaaaaagaagaactggaaagtttggacagttcctgtgatcagaggcaagatttgcccagtgaacagaataaaggtgcttctttggatagctctcaatgttcgccctcccctgcctcccaggaagaccttgaatcagagatttcagaggattctgatcaggaagtggacattgagggcgataaaagctattttaatgctggatgatgaccactggcattggcatgttcagaaaactggatttaggaataatgttttgctacagaaaatcttcatagaagaactggaaggctatataagaaagggaatcaattctctggtattctggaaacctaaaaatatttggtgcactgctcaattaacaaacctacatggagaccttaattttgacttaacaaatagtttatgtactgctcttaggttgttttgataaagtgacattatagtgattaaattcttccccctttaaaaaaacagttagtggttttcactatttataaaaaattaattttgaactttttgttaaatttttaagttatagctttaaaggttttaataggaccttcttgaacgacttttctgtaatctgtttatctcccacttaatggaaaggcaaaggggtaccccaaatccagaggtgcctacatttcaggcagccttggagtattttaaaaggaaaacattctttacttttatatgacattcttatactgctgtctcaaatccaaaaacatttcagagctcttgtctcagagatgtgtgttctttttgtcagagatatggttgatgagaatcttaaatgcttgttttgcactatcacttagtacctgtttgaccaaggtgttaaggggatagtacctcccaattcaagcagagaaactgacctgactaaagttaatcgcagatgaactagaagtcacaggttaattaaatgtaagtagattgtagatactgttttatatcaaacaatgtttataatgtgtatatagaattgttcactgtaaaaaaaatggccaaaatgtgttttttttttaataagtaacttgactataaaataaagccgtccgtgggacgactgacctcgttgcaaaaaaaaaaaaaaa

SEQ ID NO: 351 - DNA, 894 bp, HOMO SAPIENS
cagtctcaatgggggcactggggctggagggcaggggtgggaggctccaggggaggggttccctcctgctagctgtggcaggagccacttctctggtgaccttgttgctggcggtgcctatcactgtcctggctgtgctggccttagtgccccaggatcagggaggactggtaacggagacggccgaccccggggcacaggcccagcaaggactggggtttcagaagctgccagaggaggagccagaaacagatctcagccccgggctcccagctgcccacctcataggcgctccgctgaaggggcaggggctaggctgggagacgacgaaggaacaggcgtttctgacgagcgggacgcagttctcggacgccgaggggctggcgctcccgcaggacggcctctattacctctactgtctcgtcggctaccggggccgggcgccccctggcggcggggacccccagggccgctcggtcacgctgcgcagctctctgtaccgggcggggggcgcctacgggccgggcactcccgagctgctgctcgagggcgccgagacggtgactccagtgctggacccggccaggagacaagggtacgggcctctctggtacacgagcgtggggttcggcggcctggtgcagctccggaggggcgagagggtgtacgtcaacatcagtcaccccgatatggtggacttcgcgagagggaagaccttctttggggccgtgatggtggggtgagggaatatgagtgcgtggtgcgagtgcgtgaatattgggggcccggacgcccaggaccccatggcagtgggaaaaatgtaggagactgtttggaaattgattttgaacctgatgaaaataaagaatggaaagcttcagtgctgccgataaa

SEQ ID NO: 352 - DNA, 3116 bp, HOMO SAPIENS
aaagcgcatgcgccagctagatgggcagcgaggagagccgcaactgccagtccctcgaaggggttagctgtcgttgaacgtcagcacgcagatgcaactggctctcggcaggggggcgcgcgcaccgctgcggagcgccggcccgtaggcgcgggagcctccctattaagggcacgcgacatcgaggcaatagtgcgcaggtgcttagccagaggcggagcccgagaggcaggcagcggacttccggttccgggagcaacgaacagccgcggaggcgacagctaccgcttcagaggaggcggccgcggaggaggaggaaggggaggagggcgaggcgggaggtgcaggagggaccctcgccatgggtccacgggcctagagtggcggaagataccggcctggtgccaaactggctactgctgcttcctgtggcctccatggctgaggactggctggactgcccggccctgggccctggctggaagcgccgcgaagtctttcgcaagtcaggggccacctgtggacgctcagacacctattaccagagccccacaggagacaggatccgaagcaaagttgagctgactcgatacctgggccctgcgtgtgatctcaccctcttcgacttcaaacaaggcatcttgtgctatccagcccccaaggcccatcccgtggcggttgccagcaagaagcgaaagaagccttcaaggccagccaagactcggaaacgtcaggttggaccccagagtggtgaggtcaggaaggaggccccgagggatgagaccaaggctgacactgacacagccccagcttcattccctgctcctgggtgctgtgagaactgtggaatcagcttctcaggggatggcacccaaaggcagcggctcaaaacgttgtgcaaagactgtcgagcacagagaattgccttcaaccgggaacagagaatgtttaagcgtgtgggctgtggggagtgtgcagcctgccaggtaacagaagactgtggggcctgctccacctgcctcctgcagctgccccatgatgtggcatcggggctgttctgcaagtgtgaacggagacgctgcctccggattgtggaaaggagccgagggtgtggagtatgccggggctgtcagacccaagaggattgtggccattgccccatctgccttcgccctccccgccctggtctcaggcgccagtggaaatgtgtccagcgacgttgcctacggggtaaacatgcccgccgcaagggaggctgtgactccaagatggctgccaggcggcgccccggagcccagccactgcctccaccacccccatcacagtccccagagcccacagagccgcaccccagagccctggccccctcgccacctgccgagttcatctattactgtgtagacgaggacgagctaaagcggctgctgcccagtgtctggtcagagtctgaggatggggcaggatcgcccccaccttaccgtcgtcgaaagaggcccagctctgcccgacggcaccatcttggccctaccttgaagcccaccttggctacacgcacagcccaaccagaccatacccaggctccaacgaagcaggaagcaggtggtggctttgtgctgcccccgcctggcactgaccttgtgtttttacgggaaggcgcaagcagtcctgtgcaggtgccgggccctgttgcagcttccacagaagccctgttgcaggaggcccagtgctctggcctgagttgggttgtggccttaccccaggtgaagcaagagaaggcggatacccaggacgagtggacaccaggcacagctgtcctgacttctcccgtattggtgcctggctgccctagcaaggcagtagacccaggcctgccttctgtgaagcaagagccacctgacccagaggaggacaaggaggagaacaaggatgattctgcctccaaattggccccagaggaagaggcaggaggggctggcacacccgtgatcacggagattttcagcctgggtggaacccgcttccgagatacagcagtctggttgccaaggtccaaagaccttaaaaaacctggagctagaaagcagtagactggaggcttctacagactgtaggattcaagtctgcagggcaggcactcgggaagggaagatggatgtaaagtgtgggagaccgaggacacagtggagcccacgagcacgagctggaacccacgaggatggcctggaacccatgtcagtctctcaccacctccagcttcgatgatgtgggtgtcctgcagaagaagctggtgcccttcctcacagagttaaatatgcatctggcccaggaattagagaagctgaaaggatgatcctggggaaggtggagcagctgcaggcctggctgcaggcctgactactgcccacaccaacgaggtgatctagcagatacatggcaacgtgtgaactgcaacaacgcctggtgccccagcaccaaccttccaagtgtaaaaacaatgtgctgctgcttcacttccgccctccggttatcaagcaaaatgtctcttgtggcccatcttactggaagagagttccgggaaacatagcctcaccaaggtgacacattacaaagccaccctaccatgaatccgctcccaagggtctcactgctcacctgaggataactcaatataactatgtggctgaaaatgcaaagctgaagaccatggatttcatggtgattccagcaagtacagagattctatgaagcccacccagaaaaaacttgctggtcctggctatttttgtgtcatttattcaagtattgagaacctggcctgtggtaggcactgtacttaatactaggatacagaaatgcaaaagatacggcccatgcaattttattaaatgcatcaatatgtattacaaatggtgaatggatttccaactttatcatggaatttaatgctgaatatatagaattcagaaaattgttgggaggacagcccttttgtgaaccttgtttggggcacagtaggaattggaaataatttagtttctatctctaagctgttctattttaaaattatttttaaatttttattgtcccacttaaaaaaaaaaaaaaaaaaaaaaaaa

SEQ ID NO: 353 - DNA, 3870 bp, HOMO SAPIENS
gagcgccgggaccgcggcggcggggccgcggcgcgcattgcggagggcgcggagcgcaggagctgccgcctgccgggcagatccaagggggcagcacgcttcccgggagcgcccccgcctcctctccggggccgccgcaggctcggtgagcggttttatccctccggccggcaggctgggcgcgcaggggcgcgagcccccgcccggcgcgcagcagcaccatgggcacggtgctgtccctgtctcccagctaccggaaggccacgctgtttgaggatggcgcggccaccgtgggccactatacggccgtacagaacagcaagaacgccaaggacaagaacctgaagcgccactccatcatctccgtgctgccttggaagagaatcgtggccgtgtcggccaagaagaagaactccaagaaggtgcagcccaacagcagctaccagaacaacatcacgcacctcaacaatgagaacctgaagaagtcgctgtcgtgcgccaacctgtccacattcgcccagcccccaccggcccagccgcctgcacccccggccagccagctctcgggttcccagaccgggggctcctcctcagtcaagaaagcccctcaccctgccgtcacctccgcagggacgcccaaacgggtcatcgtccaggcgtccaccagtgagctgcttcgctgcctgggtgagtttctctgccgccggtgctaccgcctgaagcacctgtcccccacggaccccgtgctctggctgcgcagcgtggaccgctcgctgcttctgcagggctggcaggaccagggcttcatcacgccggccaacgtggtcttcctctacatgctctgcagggatgttatctcctccgaggtgggctcggatcacgagctccaggccgtcctgctgacatgcctgtacctctcctactcctacatgggcaacgagatctcctacccgctcaagcccttcctggtggagagctgcaaggaggccttttgggaccgttgcctctctgtcatcaacctcatgagctcaaagatgctgcagataaatgccgacccacactacttcacacaggtcttctccgacctgaagaacgagagcggccaggaggacaagaagcggctcctcctaggcctggatcggtgagcactgtagcctgcgtcatggctcaaggattcaatgcatttttaagaatttattattaaatcagttttgtgtacagtatgtgtctagcaaagccaccaagggcctcacctttcccacagtctctccctggggtttttttcatccctgccaagaactctgggcacttttgaactcacgagccttgcgcaaaacccagaagatgtattcagagccacccaggccactgacctcccactttggggaactcaaaggactgacctgcccctgccgcctgtgcccttgctgggtccagggtaggcaaggctgccggctgcaccctgtatggagctagagaggggcctctggctgcctggcccagggaggaattggggtttctggttggaggcccttttctggctcctgtgtggagttattcactctcccagaggctcctggagccagccaccctaactgagctgccagtggggtcgtgaggcaagatccccgccacccggggacatcttcaatctaggcgaggcgaagctgagcgggtctagtggaaagattgtgtctggtcgtttgaccacacaccgccctgatttgctgttttctttttttagggagaagggcttttctttagtggagaaatggaactcgcccccctacccccttgtctgctgctcccagccacgttggtggtattggccgatgagctggtttgactcattaatttctctcaatttgggtcccagctaaagaggtggggtgaagctggggacagctttcctgggtgagtttttcttttgaataatgtagtgcagtcaccctgtggcaaatgccaggacagctgcaggtgcccattagcaacgcctgccttctgggcaaggtgagggatgccataccttgagaccaagccggtgcccacctaagggctaaggcctcttgctggtgcacatgacatttgtcctgcagagctggggggaaggcgatgtggtgaccccacccccacccgttaatttaaagctgtttctaaacagttgagtttcttctaaagaggaagccttgcccagcaaggaccagtgagacagccggatcttggagacaattacaagacggggagtgagactcctgattgctctggaagcctgctgatttctacaactgatcatttgcagctgctggttttggtttccaccttaccctactggctgtaaaaacacaaatgtgtactttattgattttctttctaattctcccgcattggtggcttgggacttgggagagggagcaagccttcctccatggcccatcactcggctgtggagaacaaagaccaatgtgaagacactacagaggattctgtcttccaggcccagtccactggggagtgctggaatggggacctggggtggggaggcagagggtcactttacataggattaagttcgaggtggctaccgatttcagcacatgcactactgaaatttacacaaaaagaaagctgtgaaattgaagtcccaatttaagagtcctgaggcagaacctggtggctggaggcattcccagaggtggggaagagagcctgcccggccggagaacatctgccttgctgcacctgaggcccagcagagccgttcctgggactgtcagataatcggtgcagcggtggaaggagcctgcggctgctggcacagacttcacacagcacctcctctctgctgggtttccacacagcctgtcttcagatcctgctgccgcgtgcgaccagaggtgggaggcccctggtggcatggaagagggagggtcagtgccaagtctcaggaggagggcgcatgtgtgtatcaccctcagctggcggaacctggctgcgaactgtgcagttacgttgcatccacaggattccagttgcgtgtctgtttccttctctttctccgtatttatttttttattcttcggaggaggtggacatttcggaagtggtggggactaagggaagaactctctagttccctcagtgtgaagcctgtcgtgttctctccccttgcactggtcatcagtattgtgtaaaggaacaactgatatacttgagtgtgcaagcaaagaacccatttgccatgctgctatgaagactacttttagatcaacaataaaaaaaaacctacaaaaaaacctttattctttaattgttgcttttacggtgatattgtgcatgcaaaccaggagcattttgtgtcttaagaaaaataatcttagaacagatggctgtgaaaattacacccatgcacagaacaagccacaggaataatagttcaggatttggtttttctctttttcttgtaaacctggagggttgatatattctttccatgcagttattagaacttagttttgttccaacagttaaacttgcaatgaaaagaaaatgtgccatttttttcactcagaattattcatagctgtatatttgaaactgctaattacacacgtgtgatgtatgttggttttttagtgcaatttcttctgtagctattctttgaccaaactgtgggtattgttaatattaatttatatttgtctcattttgtatgtatgtgtagtgtgtttgtgagtatgtgtggtttataatctgacaaagtcatgaagctcagtttggctgtaatttaattccccttcccttatttttatttatttttgtactgtgctgattcaataaaatgcactgaccatccaaaaaaaaaaaaaaaaa

SEQ ID NO: 354 - DNA, 3659 bp, HOMO SAPIENS
gcagccagtcgcggaggcggggaggctgcgcggtcagaggcgcctggagcgagcgaatcctggcccaccgcctgcccaaccgcgtgaccttgattgagttaatgaacttcacgcctcagcgtccaggtctgtaaaatggggtgtctaacgcagaccgtacagcccagctgggtttagcaaacttccgggagccagttggagcctctccccatccctagcggtgatcccaggtgacgacatgccgcggggggtcctgcggaggccaccctagggcgttgctgctgcctttgggagtgtggagctccaaaccatgtcgcgagaggcggattttgggaggccgggatcctcgcgccagggggatgtgcgagggtgtgggataaatcttaattcctccggcccacccaaagcctggaaatccagcctccgcgcctcttgccctgcgggccccgccctcagtcccgccctcatctaacccgctaccccattggtggcgtccggcggcgcggctgctgttatttttcgaatatataaggaggtggaagtggcagctgcaactagaggcttccctggctggtgcctgagcccggcgtccctcgccccccgccctccccgcatccctctcctccctcgcgcctggccctgtggctcttcctccctccctccttccccccccccccacccctcgcccgctgcctccctcggcccagccagctgtgccggcgtttgttggctgccctgcgcccggccctccagccagccttctgccggccccgccgcgatggaggtgccccagccggagcccgcgccaggctcggctctcagtccagcaggcgtgtgcggtggcgcccagcgtccgggccacctcccgggcctcctgctgggatctcatggcctcctggggtccccggtgcgggcggccgcttcctcgccggtcaccaccctcacccagaccatgcacgacctcgccgggctcggcagccgcagccgcctgacgcacctatccctgtctcgacgggcatccgaatcctccctgtcgtctgaatcctccgaatcttctgatgcaggtctctgcatggattcccccagccctatggacccccacatggcggagcagacgtttgaacaggccatccaggcagccagccggatcattcgaaacgagcagtttgccatcagacgcttccagtctatgccggtgaggctgctgggccacagccccgtgcttcggaacatcaccaactcccaggcgcccgacggccggaggaagagcgaggcgggcagtggagctgccagcagctctggggaagacaaggagaatgatggatttgtcttcaagatgccatggaagcccacacatcccagctccacccatgctctggcagagtgggccagccgcagggaagcctttgcccagagacccagctcggcccccgacctgatgtgtctcagtcctgaccggaagatggaagtggaggagctcagccccctggccctaggtcgcttctctctgacccctgcagagggggatactgaggaagatgatggatttgtggacatcctagagagtgacttaaaggatgatgatgcagttcccccaggcatggagagtctcattagtgccccactggtcaagaccttggaaaaggaagaggaaaaggacctcgtcatgtacagcaagtgccagcggctcttccgctctccgtccatgccctgcagcgtgatccggcccatcctcaagaggctggagcggccccaggacagggacacgcccgtgcagaataagcggaggcggagcgtgacccctcctgaggagcagcaggaggctgaggaacctaaagcccgcgtcctccgctcaaaatcactgtgtcacgatgagatcgagaacctcctggacagtgaccaccgagagctgattggagattactctaaggccttcctcctacagacagtagacggaaagcaccaagacctcaagtacatctcaccagaaacgatggtggccctattgacgggcaagttcagcaacatcgtggataagtttgtgattgtagactgcagatacccctatgaatatgaaggcgggcacatcaagactgcggtgaacttgcccctggaacgcgacgccgagagcttcctactgaagagccccatcgcgccctgtagcctggacaagagagtcatcctcattttccactgtgaattctcatctgagcgtgggccccgcatgtgccgtttcatcagggaacgagaccgtgctgtcaacgactaccccagcctctactaccctgagatgtatatcctgaaaggcggctacaaggagttcttccctcagcacccgaacttctgtgaaccccaggactaccggcccatgaaccacgaggccttcaaggatgagctaaagaccttccgcctcaagactcgcagctgggctggggagcggagccggcgggagctctgtagccggctgcaggaccagtgaggggcctgcgccagtcctgctacctcccttgcctttcgaggcctgaagccagctgccctatgggcctgccgggctgagggcctgctggaggcctcaggtgctgtccatgggaaagatggtgtgggtgtcctgcctgtctgccccagcccagattcccctgtgtcatcccatcattttccatatcctggtgccccccacccctggaagagcccagtctgttgagttagttaagttgggttaataccagcttaaaggcagtattttgtgtcctccaggagcttcttgtttccttgttagggttaacccttcatcttcctgtgtcctgaaacgctcctttgtgtgtgtgtcagctgaggctgggggagagccgtggtccctgaggatgggtcagagctaaactccttcctggcctgagagtcagctctctgccctgtgtacttcccgggccagggctgcccctaatctctgtaggaaccgtggtatgtctgccatgttgcccctttctcttttcccctttcctgtcccaccatacgagcacctccagcctgaacagaagctcttactctttcctatttcagtgttacctgtgtgcttggtctgtttgactttacgcccatctcaggacacttccgtagactgtttaggttcccctgtcaaatatcagttacccactcggtcccagttttgttgccccagaaagggatgttattatccttgggggctcccagggcaagggttaaggcctgaatcatgagcctgctggaagcccagcccctactgctgtgaaccctggggcctgactgctcagaacttgctgctgtcttgttgcggatggatggaaggttggatggatgggtggatggccgtggatggccgtggatgcgcagtgccttgcatacccaaaccaggtgggagcgttttgttgagcatgacagcctgcagcaggaatatatgtgtgcctatttgtgtggacaaaaatatttacacttagggtttggagctattcaagaggaaatgtcacagaagcagctaaaccaaggactgagcaccctctggattctgaatctcaagatgggggcagggctgtgcttgaaggccctgctgagtcatctgttagggccttggttcaataaagcactgagcaagttgagaaaaaaaaaaaaaaaaaaaaaaaaaaaaa

SEQ ID NO: 355 - DNA, 2358 bp, HOMO SAPIENS
gcgcaggcgctttgagagacggtgaagccggtggccggtggccgggcgggaccaacaaagatggcggcggcccctgcggcgggagcgatctgggcaacggctgcggctaaagctgcagccgggcccacgggggggctgcacgggggtagtagggggtggccctgaactggggcctggccctggctggcctctcccgccgcctcactgggggacaggtactggggatacgatggctgattcgatagatctggttcctgccctcagtgcgtatactgctccccactttcgttgatgtggtagtggtgatgactgagccaaccacctaatgtggaaatgagaggacagcaagattgtgggtccagcctgtggtgtccacaatgccccaggcctctgagcaccgcctgggccgtacccgagagccacctgttaatatccagccccgagtgggatccaagctaccatttgcccccagggcccgcagcaaggagcgcagaaacccagcctctgggccaaaccccatgttacgacctctgcctccccggccaggtctgcctgatgaacggctcaagaaactggagctgggacggggacggacctcaggccctcgtcccagaggcccccttcgagcagatcatggggttcccctgcctggctcaccacccccaacagtggctttgcctctcccatctcggaccaacttagcccgttccaagtctgtgagcagtggggacttgcgtccaatggggattgccttgggagggcaccgtggcaccggagagcttggggctgcactgagccgcttggccctccggcctgagccacccactttgagacgtagcacttctctccgccgcctagggggctttcctggaccccctaccctgttcagcatacggacagagccccctgcttcccatggctccttccacatgatatccgcccggtcctctgagcctttctactctgatgacaagatggctcatcacacactccttctgggctctggtcatgttggccttcgaaacctgggaaacacgtgcttcctgaatgctgtgctgcagtgtctgagcagcactcgacctcttcgggacttctgtctgagaagggacttccggcaagaggtgcctggaggaggccgagcccaagagctcactgaagcctttgcagatgtgattggtgccctctggcaccctgactcctgcgaagctgtgaatcctactcgattccgagctgtcttccagaaatatgttccctccttctctggatacagccagcaggatgcccaagagttcctgaagctcctcatggagcggctacaccttgaaatcaaccgccgaggccgccgggctccaccgatacttgccaatggtccagttccctctccaccccgccgaggaggggctctgctagaagaacctgagttaagtgatgatgaccgagccaacctaatgtggaaacgttacctggagcgagaggacagcaagattgtggacctgtttgtgggccagttgaaaagttgtctcaagtgccaggcctgtgggtatcgctccacgaccttcgaggttttttgtgacctgtccctgcccatccccaagaaaggatttgctgggggcaaggtgtctctgcgggattgtttcaaccttttcactaaggaagaagagctagagtcggagaatgccccagtgtgtgaccgatgtcggcagaaaactcgaagtaccaaaaagttgacagtacaaagattccctcgaatcctcgtgctccatctgaatcgattttctgcctcccgaggctccatcaaaaaaagttcagtaggtgtagactttccactgcagcgactgagcctaggggactttgccagtgacaaagccggaagtcctgtataccagctgtatgccctttgcaaccactcaggcagcgtccactatggccactacacagccctgtgccggtgccagactggttggcatgtctacaatgactctcgtgtctcccctgtcagtgaaaaccaggtggcatccagcgagggctacgtgctgttctaccaactgatgcaggagccaccccggtgcctgtgacacctctaagctctggcacctgtgaagccctttaaacacccttaagccccaggctccccgtttacctcagagacgtctatttttgtgtctttttaatcggggaggggggagggggtggttgtagctccattattttttttattaaaaaatacccttccacctggaggctcccttgtctcccagccccatgtacaaagctcaccaagcccctgcccatgtacagcccccagaccctctgcaatatcactttttgtgaataaatttattaagaaaaaatgaaaaa

SEQ ID NO: 356 - DNA, 2618 bp, HOMO SAPIENS
cctctcagagccccagtcgcgcgccccttcttggttcgctcggtgcccgcgcaggcccctcgggcggtggcgaggaggcgcccaggcggaggcggcggcgggcggaggagcgcaggagcgggcggccaggccaccgcgcggcggcggagcgggccgcggcccggcgctccttccccaccgcggcccgacgcaccccggccgccgccatgagcggctcctcaggcaccccgtatctgggcagcaagatcagcctcatctccaaggcgcagatccgctacgagggcattctctacaccatcgacaccgacaactccaccgtggcgctcgccaaagtgaggtcctttggcactgaagaccgtcccacagataggcctgcgccccccagagaggagatttatgagtacatcattttccgaggaagtgacatcaaggatatcactgtgtgtgaacctccgaaagctcagcacacactcccgcaggatcccgccattgttcagtcttccctgggttctgcctccgcctcgcccttccagccgcacgtgccttacagccctttccgagggatggcgccctacggcccgctggcggccagctccctgctcagccagcagtatgccgcctccctgggtctaggagctggttttccatccatcccagtcggcaagagccccatggtggagcaggctgtgcagactggttctgctgacaacctgaatgctaaaaagctgttacctggcaagggcaccacagggacgcagctcaacggtcgtcaggcccagccgagcagcaagacggccagcgatgtagtccagccggcagctgtgcaagctcaagggcaggtgaatgacgagaacagaagacctcagaggaggcgatcaggaaacaggcgaacaaggaatcgctccagagggcaaaaccgtccaactaacgttaaggaaaacacaatcaaatttgagggtgactttgatttcgagagtgcaaatgcccagttcaaccgagaggagcttgacaaagaatttaagaagaaactgaattttaaagatgacaaggctgagaagggggaagagaaggacctggctgtggtgacccagagtgccgaagcgcccgctgaggaagaccttctggggcccaactgctactatgacaaatccaagtcgttcttcgacaacatctcttctgaactcaagaccagctccaggcggacgacgtgggccgaagagaggaagctcaacacagagacctttggggtgtcagggaggtttcttcgtggccgcagttctcggggcggattccgaggaggcaggggcaatgggaccacccgtcgcaaccccacttcccacagggccgggactggcagggtgtgagggtgcagccaaaggctcctactgaagtggcgcataactgacgctgtgtgtgtcaggacgcgaggaaaacgctgcacttacagggagaggtggtcactttgtttacggagtttggaagagacccatactgctacttgtgttttggacttaactgaacttggacatggtctgagttagaaccacttgttttggggaagtattcatgggtaacctctttgaggtctctttatctgtgtttcctttttagttgcgcatagcctaattctaaggttttggtattttgcaaaaaggtttctatagtgaaagctgaatccttactttgtgacttttttttttttttttaatgacaagctttgacttttaaaagtggaaccaaatctgttggcagaggtggcagccaagtacatctctgtaacccagctggcccctggtgctgttggcctggcaccccactgccaagggtggggtctcaggagtcaggcagggccagcacagggtggcgtggggggcaggggtgggtgggtggagggcacggaaggggttttcccatggatcatgttgtataagtgaaccagaccaccctgatggcatccacagtgatgtcaaggttggggctggccaggggtgggtggactagaagcatttgggagtagtggccaggggccctggacgctagccacggagctgctgcacagagcctggtgtccacaagcttccaggttggggttggagcctgggatgagccccggcagcgccttggcccttctgtggtccctgccagcctctgacctgggccggtcagtcattgctggactctggccacacactggcgttctcatccacttggaaacaagccagtcttttctgcaaggtcagttgaccaagagcatatttcccctctgttgtacatcgttgttttgtgtttgtgttgtaacagtgggtggagggagggtggggtctacatttgttgcatgagtcgatgggtcagaactttagtatacgcatgcgtcctctgagtgacagggcattttgtcgaaaataagcaccttggtaactaaacccctctaatagctataaaggctttagttctgtattgattaagttactgtaaaagcttgggtttatttttgtaggacttaatggctaagaattagaacatagcaagggggctcctctgttggagtaatgtaaattgtaattataaataaacatgcaaacctttaaaattttaaaaaaaaaaaaaaaaaaaaaaaa

SEQ ID NO: 357 - DNA, 1514 bp, HOMO SAPIENS
gagggaggagggcgggcgagctggagccggcaggcagcgggagcccgagagagccgcgtcgggagtgcggtctccatggcagtgctgggcgcagccggagagagcctgtccagggggctgagccccacccccaaatccctggggcatccagaagattcctgactggtcaagaaccagaggcaaaagagacctggaagtcccagcatggggaccagaaccccccagccagcctcatagttgggaaagtagccagcttgcctgccccatcaattgcagggatgcttaaggaaggccccgcccagtatgaaagctgaggattgcctctgctgaccctcagtctcctcccctgccctctacatctgccctcagctgggtccatcatgcaatgctgagcactggggtggtgagcttcttctccctcaagtcggactcggcgcccccctggatggtgctggctgtgctgtggtgctccatggcacagacgctgctgctgccctccttcatctggtcctgcgagcgctaccgcgccgacgtgcgcacagtgtgggagcaatgcgtggccatcatgtctgaggaggatggagatgacgatgggggctgtgacgactatgcagagggccgagtttgcaaagttcgctttgatgctaacggagccacaggaccagggagccgggaccccgcccaggtgaagctgctgcctggaaggcacatgctcttccctcctcttgagagagtccactacttacaggtccccctatcccggcgtctgtcccatgatgagacaaacatcttctctacccctcgggaaccaggctccttcctgcacaagtggtcatcctctgatgacatccgggtcctcccagcccagagccgggccctcgggggtcctcctgagtacctgggacaaagacacaggttggaggacgaggaggacgaggaagaggctgaaggtggggggctggccagccttcgccaattcttggagagtggggttctggggtcaggtgggggacccccacggggtcctggcttcttccgggaggagatcaccaccttcatcgatgagacacctctgccttctccgactgcctcaccagggcactctcctcgtcggccccggccactgggcctctcaccccgccgactctcccttgggtcccctgagagcagagccgttggacttcctttgggactaagcgcagggagacgctgctccctgacggggggtgaagaaagtgcaagggcttggggaggatcctggggcccaggcaaccccatctttccccagctgaccctgtgagcccaagcaggcctgctgaactcagaggagaaagcctgagtgagtaacacctcattctggccgagagtagggcagctgcctccagactctggggagacgggcgctagatttggggctcagaaggccctgctctctcccatccaagtgaccagatgccctactcagcttccatcacccctagcaatatgtattaaagtctgaagtgttgccatgg

SEQ ID NO: 358 - DNA, 4348 bp, HOMO SAPIENS
agtgcggagccttaggcggagcgaagagaaccggtcgcggcaatcctagcgcgcagcagcagcagcagcagcagcagcagcagcagcagcagcagcagcacccgcatccgctgcgggagtccgagccggaaccacacccaagtagctgccctttcctcttctgtcatctcaccgccccaccacagaccgcgttccccgaggaaaccggccgcccacgcccggagcatcctcccctgttgagcgggcgctgacggacccggcggcatgatgcggctgcgaggctcggggatgctgcgggacctgctcctgcggtcgcccgccggcgtgagcgcgactctgcggcgggcacagcccttggtcaccctgtgccggcgtccccgaggcgggggacggccggccgcgggcccggctgccgccgcgcgactccacccgtggtggggcgggggcggctggccggcggagcccctcgcgcggggcctgtccagctctccttcggagatcttgcaggagctgggcaaggggagcacgcatccgcagcccggggtgtcgccacccgctgccccggcggcgcccggccccaaggacggccccggggagacggacgcgtttggcaacagcgagggcaaagagctggtggcctcaggtgaaaataaaataaaacagggtctgttacctagcttggaagatttgctgttctatacaattgctgaaggacaagagaaaatacctgttcataaatttattacagcactcaaatctacaggattgcgaacgtctgatcccaggttgaaagagtgtatggatatgttaagattaactcttcaaacaacatcagatggtgtcatgctagacaaagatctttttaaaaaatgtgttcagagcaacattgttttgttgacacaagcatttagaagaaagtttgtgattcctgactttatgtcttttacctcacacattgatgagttatatgaaagtgctaaaaagcagtctggaggaaaggttgcagattatattcctcaactggccaaattcagtcccgatttgtggggtgtgtctgtttgtacagtagatggacagaggcattctactggagataccaaagttcccttctgtcttcagtcctgtgtaaaacctttgaaatatgccattgctgttaatgatcttggaactgaatatgtgcatcgatatgttggaaaagagccgagtggactaagattcaacaaactatttttgaatgaagatgataaaccacataatcctatggtaaatgctggagcaattgttgtgacttcactaataaagcaaggagtaaataatgctgaaaaatttgactatgtcatgcagtttttgaataagatggctggtaatgaatatgttggattcagtaatgcaacgtttcagtctgaaagagaaagtggagatcgaaattttgcaataggatattacttaaaagaaaagaagtgttttccagaaggcacagacatggttggtatattagacttctacttccagctgtgctccattgaagtgacttgtgaatcagccagtgtgatggctgcgacactggctaatggtggtttctgcccaattactggtgaaagagtactgagccctgaagcagttcgaaatacattgagtttgatgcattcctgtggcatgtatgacttctcagggcagtttgctttccatgttggtcttcctgcaaaatctggagttgctgggggcattcttttagttgtccccaatgttatgggtatgatgtgctggtctcctcctctggataagatgggcaacagtgttaagggaattcacttttgtcacgatcttgtttctctgtgtaatttccataactatgataatttgagacactttgcaaaaaaacttgatcctcgaagagaaggtggtgatcaaagggtaaagtcagtgataaatcttttgtttgctgcatatactggagatgtgtctgcacttcgaagatttgctttgtcagctatggacatggaacagcgggactatgattctagaacagcactccatgtagctgctgcagagggtcatgttgaagttgttaaatttttgctggaagcctgcaaagtaaaccctttccccaaggacaggtggaataacactcccatggatgaagcactgcactttggacaccatgatgtatttaaaattctccaagaataccaagtccagtacacacctcaaggagattctgacaacgggaaggaaaatcaaaccgtccataagaatcttgatggattgttgtaatggtctcaaatcccaagatttaaatcacttacctatttaattgtggaaaatgattatgaagaacatgtgtatttctatctggtagtgatgtatattttacatttgtcatttcagtgttactggagttttcttcattgtgcacacaggacaaatctgatctctttgggaaaaaatagaaataaaacaatctccctccataatgtgagcaatattacctcgtgcattgtataatttgatgtaaaagaaatagttaccaatgctagcttgtgtggtcttccatgatttatttgtgttttgtgaattttcaatttatggtgatgatctgctgatatgcatttataaagtaagctctgttgtacagtctgtccaaatgggtcaaggttgcctttagaagcaaatagtgtgattttcaagacttcaaatacaaatttagtttaagtgtttgaacaactatatgcacttacggttgtgtgtttaaaatgtctctctcaccccctagcttcatgatgtgactcttaaaaaactataatagttaacaactgttagtaagatagaccaattctgattagactttatcagggaatctgtttaagatatgtttggtgaccaaaacgtatgtgtgaatgtagttataatgcttttgaaaaattttcctttttctatatccccttagtccagcctctcttctcagacatttagctatctgcctctttcctttagctgggaaagtgagagctggcatactatgcagtttttatgttttccatagtaagtcagaaaatgcctcctatttctggcatcagaactttgccatttgtctacagaagacgaaccagagacaaaattactaagtataaattagtcaagtttatcagtctaaaaaacgaagggatgtgcaactgcagctctttaagaagttttttttttttagcttctagggtaaagataaattcagaaatgctctaagctaccaaagttattctgaaagtatgggaactgctacaactaacaaacatttgtttccaagcctgtcattaagagtctgcatcaagagatttgtcctccttgggggaccactggatcattccagatttcttgtgatttttctattgtgtaattcttggtgggctctgtagtttaataataagaaaaaggccatttcattttaaattgtgacctataattctttgtcttgggttggtaattcaggattcatttggaaagtgggtaaaaggggcttcaaaaaacggatagaacaggattttctaggagttacacatacattttatcctgtcatacctcgagataaagtggcatgttagtgaggagttctgatattaagcacacacacacatgcacacaaatggacttctctgaagctgtgtttagtgaaatgagctcaagtacatgaatgttagttgttatcacatacagcaaattcctttttttttctttttctatgagcacactctgctgcttctaaactttacatgcctgatggcaccttactccagcagcctccaggtgctttcattttcacttccagtctaagccagtggctcctgccactgccctcccattacctagatggcacctcctttggtgaaaccacggccaatgttccttagctgcaccaggcccgaagctgttcccatgcttgagcttccatggggaggatgctgagtgagcagtttcctaccccgtggatctagcaagccatggagacaggtagcatttgtaagatgctgcacaggagcagcattatccccaaagatattacagggtagacacgttttaactgaaatcaatcaagataactttattcaaagagcagcccgctttgtgtgactaaaatgaaacaagacagttgaattgtgtgacttgaagattaccaatgattttgaggcttttctataataaaaagaggttctaaccattatttgggaacaaagagagttttcatcttttttcagatcaaaaccattctgtaaaatctttgttgtttaattaaatgtgccgttatttacccctgatgttatttatgactatgtgccgattcctgctaaaaaaaaaa

SEQ ID NO: 359 - DNA, 2609 bp, HOMO SAPIENS
gaagaactggaactggtctggccatagggggaagcggcgcgttaaatccgccccctctccataccctactttcaaggggtgggcggtagaggggaggttggggttggagcagcggcgagggggcccctcccttgcacctccccccaccggacttggtcgcgcccgaagtgtaacactttctctttgtcggaggagctcctctgtttcctgtgcagtagctcccgttgcggcggcacccgtggcagccctggcggacgcaggagcgatggcagcgaccgatatagctcgccaggtgggtgaaggttgccgaactgtccccctggctggacatgtggggtttgacagcttgcctgaccagctggtgaataagtccgtcagccagggcttctgcttcaacatcctgtgcgtgggagagacaggtttgggcaagtccaccctcatggacaccctgttcaacaccaaattcgaaggggagccagccacccacacacagccgggtgtccagctccagtctaatacctatgacctccaagagagcaacgtgaggctaaagctcacgatcgttagcacagttggctttggggaccagatcaacaaagaggacagctacaagcctatcgtggaattcatcgatgcacaattcgaggcctacctgcaggaagagctaaagatccgaagagtgctacacacctaccatgactcccgaatccatgtctgcttgtatttcattgcccccacgggtcattccctgaagtctctggacctagtgactatgaagaagctggacagtaaggtgaacatcatccccatcattgccaaagcagatgccatttcgaagagtgagctaacaaagttcaaaatcaaaatcaccagcgagcttgtcagcaacggagtccagatctatcagtttcctacagatgatgagtcggtggcagagatcaatggaaccatgaacgcccacctgccgtttgctgtcattggcagcacagaagaactgaagataggcaacaagatgatgagggcgcggcagtatccttggggcactgtgcaggttgaaaacgaggcccactgcgactttgtgaagctgcgggagatgctgattcgggtcaacatggaggatctgcgggagcagacccacacccggcactatgagctgtatcgccgctgtaagctggaggagatgggcttcaaggacaccgaccctgacagcaaacccttcagtttacaggagacatatgaggccaaaaggaacgagttcctaggggaactccagaaaaaagaagaggagatgagacagatgttcgtccagcgagtcaaagagaaagaagcggagctcaaagaggcagagaaagagctgcacgagaagtttgaccgtctgaagaaactgcaccaggacgagaagaagaaactggaggataagaagaaatccctggatgatgaagtgaatgctttcaagcaaagaaagacggcggctgagctgctccagtcccagggctcccaggctggaggctcacagactctgaagagagacaaagagaagaaaaattaactctgctgtttgctgcatgctgcatgagacccagggtcctgctttttttaatcttgtcttcagcagctgcactaagtctaaaggagaagactgccattatagaagagttagggttccatattgtctcaaatcagaaatcaaccaatttcctctcccctcaaactgcaagcacacacacatacaccacaccactcaacaagtgttcatgtgtccctgtgtccaggcaagaagctctcttcctgactcacatggtattttaaatggaagtgtcttgtcctaactaacaaggcaggaaaagaaccatcagagctggaaaatggacgaaatgtaacctcagagaaacaactacaggaccactcacccaagtgtaagtgactggggcaggacacctcagctgtgggtatgaaagtactgttctgttcacaaggttttgtttgagttttatgtttttcttttaaacatttctctggttcgatgggttgactgtctacagccactgttaaacatttctgaatatgcaagagaaagtcaagtgacatttgtatcttcttcagcattcgcagaccttctatagattccagcaaagggggaaaatgtatccactatctaacacttaggtagagaagggagggggtttaagcttagtgagggcaaaattactccattccaccttccgagaccagttagggttttgagagaggtttctgctcaacctgggatctggagggagagctttgatgttggtaaatctgccttgaattcattggtttaacttgcatcaaaataccatgtgagtgtgctcattctcatatatcccctaccaccatcaccaccattctgctgttcagtgtctcttgagagagcctctttgcatgttttccagaatctgtgtgtgtttttcctttcttctcctttgttctttttgctcaaaggtgtgaccagtcattgcccctctggggctttcattctccaggagaaacatcccagaaccagcactgtttagcctgatacctttctaatgtccatgtcaattttcaataaaattcaaagaaatgctaaa

SEQ ID NO: 360 - DNA, 9895 bp, HOMO SAPIENS
gggaggtggctgccgggtgggaggtgtgtgcgcgtgtgccgcgccgtagggagcggcgggtcgcgccgccggctgtcagctagctccgcgccgccgcccgatggcgcgaggaggcgcgcgggcccagccccggggggccggccgcgggtgagcccctcggcctgccgcccgcgagcatgtcacctccagccgccgccgccgcagcctccgccagccgcgcccgcgcccccgcctcccgcagccgcagccgctgcctcgggcattggcccccagacccccgcctctgatccacgcccagaccctagctccagagggccatggccggccagggggactgctgcgtcaaggtggccgtcaggatccggccccagctgtcgaaggagaagattgagggctgtcacatctgtacctctgttaccccgggagagccccaggtcctgctggggaaggacaaggccttcacctatgactttgtcttcgacctggacacctggcaagaacagatctattccacctgtgtgagcaagctcatcgagggctgcttcgagggctataatgccacggtgctggcctatgggcagacgggggccgggaagacgtacaccatgggcactggctttgacatggcaacgtcggaggaggagcagggcatcatcccgagggccatcgcacacctctttgggggcattgccgagcgcaagcgccgggcacaggagcagggcgtggctggacctgagttcaaagtcagcgcccagtttctggagctctacaacgaggagatccttgacctgtttgacagcacccgtgaccctgacacccgccaccgcaggtccaacatcaagatccacgaggacgcaaacggtggcatctacaccactggcgtcacttctcgcctcatccactcccaggaggagctgatccagtgcctgaagcagggggccctgtcccgcaccacagccagcacccagatgaacgtgcagagctcacgctcccacgccatcttcaccatccacctgtgccagatgcgcatgtgcacccagcccgacctggtgaatgaggcggtgactgggcttcctgatggtacacctccctcgagtgagtatgagacactcactgctaagtttcactttgtggacctggccggctcagagcggctgaagcggacaggggctactggcgagcgggccaaggagggcatctccatcaactgtggcctgctggccttgggcaatgtgatcagcgccttaggggaccagagcaagaaggtggtgcacgttccctacagggactccaagctcactcggctcctccaggattcgctggggggcaacagccagaccatcatgatcgcctgtgtgagcccctcagaccgagatttcatggagaccctcaacacactcaaatatgccaatcgggcccgcaacatcaagaacaaggtggtagtgaaccaggacaagaccagccagcaaatcagtgcactgcgggctgagattgctcggctgcagatggagctgatggagtataaggcgggcaagcgagtgataggagaggatggcgctgagggctatagtgatctgttccgagagaatgccatgctacagaaggagaatggggccctgcggctgcgggtgaaagccatgcaggaggccatcgatgccatcaacaaccgcgtcacccagctcatgagccaggaggccaacctgctgctagccaaggccggcgatggcaatgaggccattggtgcgctgatccagaactacatccgggagatcgaggagctacggactaagcttctagagagtgaagccatgaacgagtccctgcgccgcagcctctcacgggcctcggctaggagcccctactccctgggtgcttctccagccgccccggccttcgggggcagccctgccagctccatggaggatgcctcggaggtgatccgcagggccaagcaggacctggagcggctaaagaagaaggaggtcaggcagcggaggaagagccccgagaaggaagccttcaaaaagagggcaaaactccaacaggagaacagcgaggagacggatgagaacgaggcggaggaggaggaggaagagcgagacgagagtggctgtgaggaggaggaagggcgcgaggatgaagatgaggactcgggcagtgaagagagcctggtggactcagactcagaccccgaggagaaggaggtgaacttccaggcggacctggccgacctgacttgtgagatcgaaatcaagcagaagctgatcgacgagctggagaacagccagcggcggttgcagacgctcaagcaccagtatgaggaaaagctgattctgctgcagaacaagatccgagacacacagctggagcgcgaccgtgtgctgcagaacctcagcaccatggagtgctatactgaggagaaggccaacaagatcaaggcagactatgagaagaggctgcgggagatgaaccgggacctgcagaagctgcaggccgcccagaaagagcacgcccggctgcttaagaaccagtcgcgctacgagagggagctgaagaagctacaggccgaggtggctgagatgaagaaggccaaggtggccctgatgaagcagatgcgtgaggagcaacagcggcggcggctagtggagaccaagaggaaccgggagatcgcacagctcaagaaggagcagcggcgacaggagtttcagatccgagctctggagtcccagaagcggcagcaggagatggtcctgaggaggaagacccaggaggtttctgcactgaggcgcctggccaagcccatgtctgagcgggtggcagggcgtgcaggactaaagccacccatgctggactctggggctgaggtgtcggccagcactacctcatctgaggctgaatcaggggcccgctctgtctccagcatcgtgcgccagtggaaccgcaaaatcaaccacttcttgggggaccatcctgcgcccactgtcaatggcacccgtcctgcccgaaagaagttccagaagaagggggccagccagagcttcagtaaggcggcaaggctcaagtggcagtccctggagcgacggatcattgacatcgtcatgcagagaatgaccattgtcaacctggaggctgacatggagcggctcatcaagaaaagggaggagctgttcctcctgcaggaggcactgcggaggaagcgggagcggctgcaggctgagagccccgaggaagagaaggggctgcaggagctggctgaggagatcgaggtgctggcagccaacattgactacatcaatgacggcatcaccgactgccaggccaccatcgtgcagctggaggagaccaaggaggagctggactccacagacacatccgtggtcatcagctcctgctccctggctgaagcccgcctcctgctagacaacttcctcaaggcatccattgacaaggggctgcaagtggcacaaaaggaagcccagatccggctgttggagggccgactgaggcagacggatatggcaggctcctcccagaaccatctgctcctggacgccctgcgtgagaaggctgaagctcaccccgagctgcaggccctcatctacaatgtgcagcaggagaatggctacgccagcacagatgaggagatctcagagttctctgagggcagcttctcccagtcattcaccatgaaaggctccaccagccatgacgatttcaagttcaagagcgagcccaaactgtctgcccaaatgaaagctgtgtcggctgagtgcctgggccccccactggatatctccaccaagaacatcaccaagtccctggcctccctcgttgagatcaaagaggacggagtgggcttctctgtccgagacccctattaccgggacagggtctcgcgcaccgtcagtctgcctacccggggcagcactttccctaggcaatctcgagccacagagacgtccccgctgacgagaaggaagtcctacgaccgagggcagcccattaggtccacagatgtgggattcacacccccatcatcccctcccactcggccccgcaatgaccgcaatgtcttctctcgtctcaccagtaatcagagccaggggtcagcgctggacaagggcatcatctccccggttggaggagccaagggtgcacggacggccccactgcagtgtgtctccatggccgaaggccacaccaagcccatcctctgcctggatgccacagatgagttgctattcacagggtccaaagaccgaagctgcaagatgtggaacttggttacgggacaggagatcgcagctctaaagggccaccccaacaacgtggtctccatcaagtactgcagccactcggggcttgtgttctccgtgtccacctcctacatcaaggtgtgggacatccgggactcagccaagtgcattcggactctcacgtcctcgggccaggtgatctcaggggatgcctgtgccgccacatccacccgtgccatcaccagtgctcagggcgagcatcagatcaaccagatcgccctcagcccttcgggcaccatgctgtacgccgcctcgggcaatgccgtccgcatctgggagcttagcaggttccagcctgtcggcaagctgactggccacatcggccctgtgatgtgcctgacggtcacccagacggccagccagcatgacctcgtggtgactggctccaaggaccactacgttaagatgttcgagctgggcgagtgtgtgacgggcaccatcggccccactcacaacttcgagcccccgcactacgatggcatcgagtgtctcgccatccagggagacatcctgttcagtggctcccgagataacggcatcaagaagtgggacctagaccagcaggagctcatccagcaaatccccaatgcgcacaaggactgggtgtgcgccctggccttcatcccgggccgccccatgctgctcagcgcctgccgtgcgggtgtcatcaaggtctggaacgtggacaacttcacacccatcggtgagatcaagggccacgacagtcccatcaatgccatctgcaccaatgccaagcatatcttcacagcctccagtgactgccgggtaaagttgtggaattacgtccctggactcaccccctgccttcctcgccgagtcctggccataaagggccgcgccaccaccctgccctgaccctccccaactctccctgtctcctctttcattcttcccctctttccttttccctctctttccccacttcgatctgagctgcttcttaacggtatgagattattttactccttcttcttcctttcccttcctgtcctgcctggcctagagaggtgccctgcctgtccctcctgcacccaccgtccttttccaagcatgaacagtgggacaggccccaggagatgggtgccagggagcagaagggggagccttcaggcctggacaaaacgaaacacccccccaaaaaaagaaaacccatgacaaagctcccctgggggcctctgagtgcacaggcctctccatctgcccagcaccccaccacctgcagtccacctccccgtaagccatgcttgcctcccagccccaaccacatttggggagtttggggaatccagttcatcctctacttttgggggcagccagccaagcccactgcaagagctgaccggcacccctccactttgtcctccaccccagtgacctgacggtgaagttctggagtgtccggcggttaccccacagcggcccaccctaggagtgaggtcagagggatgcccccggaccctcgaccccagcagcctggacaccatggaagggaagctgtgacccggccgatggggccagctgctctggggacagagggcgtggccccctctcctgccctcctccctctcccttggccttcccacaggacactgttccctcatccctcccctgcctctcaggagcctctgggtgagagagaggctggggaggaaattaagctgtgaagccaaagggcattatcccttcttgttcccctcctggcagtcgtggccacattgtctcctgctgaaccggctctgcccctttctcaggcctttggcccagtggtggagccctgtggggaggtgcagcagcctggccccatcccacccttccgaggagctggcctccccgcttctcccagcccagcctctagagccactgcacctgcctctgagcccaaaaagataagtcctcaggtagctaaggaaaccaggtgtgggcggctgggccttgcagctaacccttaaccctctggcaacccgcagatagccccaactggccccaacagttccctggggtcccttttggatggggccaaggtggagctgctagaaagattcctttggggagatggtcagaaatacttcagttatttattattttgttatttttattttttgctgttgcctcctggaaacggacttgaagtttcttcccctatattctttccctcagctcttgggggccagaaatcccaaagggagtccgctgccccggccctccagggccgcctcctctgtttgctttgcagaggagggaactgctccttcgactctgcagctcaggcctgtccccgacacagcccccagggagtcttctagctacccctggcctctaggccgcctgacgctcagtgccttcctccgttccggggcctggcacccgtgccgggcagccttacaccagccatgcccgcggcaccacatgtgtcttctcactcgcgaggtcttgtgcccagcgcccccgggaaggcgggggcgctcaccccacagcccaggccccggggttctgccccacagtcctgcgtgggccacgtaggaagcagcgtgggggctgtgtctgctgggaggtggcttggatggggaggacagcccggcaccctgacccccgcccctccccagccctgcagtcccccactgggccggggagtctctccagcttctctctctctggttattcaggagacacattttcggccttaaaactggcatggagcgcaggccctcccttgcagaaaattatcaaggaagagggagttggcagagtttctctgccccggggctggggacgcggagctccggggaaattgttaaatcagtgttctggcgccccctgttgggggaactctggaattacaggagtgggccttgggggggactgagctccatccctctcccccgccccacccccacccaaagttgcccaccctgtttttccgttgcatcgctggtcttgtgcttcccgcttcagtctgggagccaagagccagccccacctcccttcagaggacgcagtgacttttggactttccagaggtggttctgtgtttctgcccttggctcctctccgtcttgggctggggcacttggagccctctccatgtggcgcccagtgttggggggaggcaggctccagtggaggctgagtgaggcctggtcccttccccgtgccctcctcggagctgccacagaggctaagacggctgtcctgctggtgctggccctgctggatgtggtattgaagtctggggcagctgatagcaggaaggagacccccttggatgctggtctcctgggacctgaacagtctgtcagcaatggctggaaatccttcttcctctggccaccccgggggtgccgggcaacccccttagctctaagatgtggccacaaatctcttcccactcctccccgccaacctgaacagaaagttttgaccttgcaacctgtaagaaagaatccgtccgcatgactgtttacaagcgatagaaacacgtaagactctgtccccttgagctcccacccccgggccggggatgccccacctggggtgactgcactgtagctgcaaggcgtgttcttgcacgaagtgtgatcttatggccctgcgagaggtgctcatcatcatgcccattttctgctgtttctgatgggtcagctacctcacggcggggtcagctctgctgtcctggcaagtgtcattgactctctaaacttgaagtccttcaggagccctgagcccaacatccatgagacaccccgagttgtgcttcatgagagttggattctctgcccactctttcagggatgtccaaggtccatgttagggggcaggcccccagctccactcactgcacaagcaccctaaatgttggaagcacaaaatggttgtgatttgagcacaatggcagggtcccgcaggcagacttgacaggcccaggcccgggaggatccccccacgttggctctgtccaaagtgagattgggggtgcctgtgtctgggacagggggctgcccttgctcagaccaggccttggctcatggcttgtcctaattctgggactcgtcatcttacttcttgcccttctgtgcccatcttaagactggaggctgagccttgtcaggcccagccacatctttacgccatgggaccaggagtaaagcgctctctaaaccccgcaccccaaatctctaaacgcctgagttcaggctgagtcctagccctagtgagcctgaagagcttggactgattcccagtctcctgggtcaagccccactttgtgctttcgaagcttatgagcgggttccctggatagaaggagtcttccatccccactgcccttgggcctcttcagcatagtcctgtgccagggccctgtcctcactatcagtcagttcagtatttgctttcacgtgagtggcggactcttctgaagcagccagaactctcaaaggcagcgcatggagttgccttgcgagatttccaaggaaggaggaaagattaacaggcggagcctggcacacccaagcctttgaggtggtcagagtgccaccttcagccccttgggaagggacagcggtgggtctgggagtggcctcaccctggattcagcctaggaatctcttcaccctcagctgtccagccctgctgcctgtctggggatgtgtggcctgggcagagggcagtttaaagcacaaaaccacatggggaaaacacaaggttgcggggactttctcatgtgcctgatgtggtggagggagacaccagcaggtggctgcagtgacgttagggaacataacacttctttgccctgctagctctcagctctggggggcatcccccgatgtggtctgggctgggagcaggcatatcccctggttgttgcctgtgcctggtctgttcaccatcgtgtttgtgtgggcagagcctgccctgcaggagcagtgactttcttcccactgtgtgtcccggacctgtggtatgtgtccctttgccatcccaaacaggcaactgcttgctgctctccttgcttggcatagcctcctggtcagtggccaatgccccacaggccttcctgggcctggccctcctctcctgactcccagatccttccctgccctcttgtgtgcaaggacagattttgcagggaaagttctgtttcttctttgatacctttgttctgtcccctgccccatccccagcactcatgatcttgaagcccctatcacactctagttcagtcctgtgaaccatgtcctgagggccttgcagggaagtaggaaatagaaactcctccacaaagagccgaggatcagagaagacccctgagatgaatcagggccctgccctgcccaccaactcttttctagcaatcatgtcctgcccaggctgcaggcttcattaggctcctgctgtcctccatgatgtgactagcacaaggtgtatatatgttttgtacctctgccgatggctgtacatagtgtatgaaagttatttaagccccatgttgtacatttctgttcctagattggatgtgtgtgttctaagaagttgtcataaataaaacctgaatgacc

SEQ ID NO: 361 - DNA, 3057 bp, HOMO SAPIENS
aatcgcgtcgccgccgcttccgccctcagccggccccacctctgccggctcgtactcggctcccccacctcgccgcagagctagcccgggaagcccacactggcggccacggagcagagtccctcacccccaccagctgtagctgaacgtctggatggtggagaagagcagggttccgagtctgaggaagacataaccttgtgcctgcctgcccacctctctctctggtcctgttcatctctcaggctctgagacactgaccttcactgctcagttaaaggttccagggattccactttgtctggacccatccagctgagtgaacccagggtggtggtgtatctggggagagtgaggagtgggttgtccaaacaccagggaaagagccctttggggcctcagacagcggagtgaagctggaaccatcagggaacatgagtgaattttggcacaaactgggctgctgtgtggtagagaaaccccagccgaagaagaagagaagacggattgaccggaccatgattggggaaccaatgaattttgttcacctgactcacattggctcaggggagatgggggccggagatggacttgccatgacaggtgcagttcaggagcagatgagatccaagggaaaccgagataggccatggagcaattctaggggcttatagctccaataatggaatggttctgccatcttgaaacccccattctgtttccagcccagaagaaatgctgcccctaccagatccctccttgaaccagtgatctaaggacccctcttttccctatctgcctaacagtgcctcacaaggcttgggggctggactccctctactccctctggccatagcccctcctggagatggggtcaaggcagcaggactgatcaagtgactactggttagccagaggagctcagctgaagccctggaaaccctcaggtctgagataggagttctctaggaacctggaatgagttcctgtctcctgaatgatggtctgggtgccacctgtttttaaactcttaaacctggaactccttaaatggggtaggtgggtgagattatcaaagctgaagctggctttgctgagaagctccctacctccctgcccttctcctccttcctgctggaatgaactaaagcagatgtcaagcaggggctggtgggggtgcctactcccttttccactctatctttagatttcaaaccttaggcttacagcccctcaatatctctctgctaacaccagtgtctctttctagttaggcctctaatcttctgtttctgtttaccagcttcccagcaactttccttttttaaaatattaaaaatttaattcaggttctcttaattatcctcatcctgctgttgcctccgcccttaactctatccctattaggaaccttgtttcccaccgaataagagttaaggtaagaggtagctcttcacctgatgacattccatttaagttttggggcatctttcctgccctctgccaacctccctgctggcccaggtgagaggaggaagaggggtctggaaagaaacccagaatgcggcagaactaggagtaagtccatctcaaggtggacttctgatcattgaggatggtgagataaataggttgaaaacaatcatctgtgagtttaggagtcttaagatcctcacagcacgggagcagggagaggctctagaacaaggtttcacaaccgagatgcctttgacattttgggctgaagtgttctttgtaaggaaaacctgtttcctattttgtgcattacaggatatttagcagcaaccctggcccactctagttatgacaaccaaaaatgtctctatacattgccagatttctcctagggggcaaaatcgcctccatttgagaaccacaactctaaagtcaagatatttttctctgaagtgatttctgcttggcacgctaccctcatcatcttactcatcttaagcccgagccatggatcaactaggagcccatataaatgaggctcagtagggctgcacataatctccaaacaattctttattcagtgttttgcttgtgtttgcatgttgctatgatggacaggtccccctcctccattcttgccctctggagaagtggttcctgcagtgtagagatatgaacagggtatggtaggattggggaaaggggagagagaagcagtagatacactccttatcctccccaaattttaagctctatttctgtgccctagtcctagacacacattagactcagggagttttgtctgaagaccaggtcccactgccccctggctgaagagtctgctttaaatgggaaaacaacgtaggagcaggggtttttaggcactttcagtattctcaggtgttcttcgttctggcccttccagggtaattaggaaggcagaacaagacagatgagctcctgcctgctctgagacaagaagggtggggtctcattagctttgcaacaggaaacatcctgttttatggtagtggggtcaggaatgtaggaactggtatccattctgccaattccaccacccattcagtttgcttatccctacagaacagtgactgaggttctttttttttttttttttttttttttttcaaatttccatgtattttctgccatttttcagggtctaagattggtcatacattcccaatttactctcagttccagtcaagctggttgctctgaaagtaacccagcttgttgctctaaaatacctcagtagcctgagtgttatactagagatctaaagggttaacaggatagggtggaaaggttagagactcctagaaatctctggtcaccgtgatcttcggcctcattctaatacctgttctttggacagtctttttcctttggtgctctcttgcctttagctaccttctctaatatgtatgctaccatcactaataaagtgatgggaatgggtttgagagtcgtaatttatattaaaaagttgttggacttttaaatacattttttcaaataaaaaattaagcaaaatagttgcacagtaaaaaaaaaaaa

SEQ ID NO: 362 - DNA, 591 bp, HOMO SAPIENS
gccactctccatccaggccccaggcaagcagcacctccctgctctcctgcactcctggacacaaccagcagctcctgccatggacaggtggtacctgggcggcagccccaagggggacgtggacccgttctactatgactatgagaccgttcgcaatgggggcctgatcttcgctggactggccttcatcgtggggctcctcatcctcctcagcagaagattccgctgtgggggcaataagaagcgcaggcaaatcaatgaagatgagccgtaacagcagcctcggcggtgccacccactgcactggggccagctgggaagccaagcatggccctgcctctggcgcctccccttcttccctgggctttagacctttgtccccgtcactgccagcgcttgggctgaaggaagctccagactcaatgtgacccccaggtggcatcgccaactcctgcctcgtgccacctcatgcttataataaagccggcgtcagagaccgctgcttccctcacctgcctgcctgtctccctcctctgtcaccaccagcctctccaagctcaagtacaaatacagccgggaaaaaaaaaaaaa

SEQ ID NO: 363 - DNA, 2657 bp, HOMO SAPIENS
gggcatacgcatgcgtgcacgctgccggtcgggctgggctgagaggggagggggcggcggcggccgaggcggcgtcgttatttccgtggtccggacagtgcgtggcggcgcgggtgaccacgggagaagtaggcataatggttatgaaagcttctgtagatgatgacgattcaggatgggagctcagtatgccagaaaaaatggagaaaagcaatacaaactgggtggacattacccaagattttgaagaagcttgtcgagaattaaagttgggagaactacttcatgataagctatttggtctttttgaagccatgtctgctattgaaatgatggatcccaagatggatgctggcatgattggaaaccaagttaatcgaaaagttctcaattttgaacaagctatcaaggatggcactattaaaattaaagatctcaccttgcctgaactgatagggattatggatacatgtttttgctgtttgataacgtggttagaaggccattcactggcacagacagtatttacgtgcctttacattcataatccagactttatagaagatcctgctatgaaggcttttgctctgggaatcttgaaaatctgtgacattgcaagggaaaaagtaaataaagctgctgtttttgaagaggaagattttcagtcaatgacttatggatttaaaatggctaacagtgtgacagatcttcgagttacaggcatgctaaaagatgtggaggatgacatgcaaagaagagtaaagagtactcgaagtcgacaaggagaagaaagagatccagaagttgaactagaacaccaacaatgtttagcagtattcagcagagtgaaatttactcgtgtgttactgacagtgcttatagcctttactaagaaagagaccagtgctgttgcagaagctcaaaaattgatggttcaagcagcagatcttctttctgccattcataattcattgcatcatggcatccaggcccagaatgatactacaaaaggagatcatccaattatgatgggttttgaaccccttgtgaaccagaggctacttccacctaccttccctcgatatgcaaaaataattaaaagggaagaaatggtgaactattttgcaagattaatagatagaataaaaactgtctgtgaggttgtgaatttaacaaatttacattgtatcctggattttttctgtgaatttagtgaacagtcaccatgtgttctttcaagatctctgttacaaaccactttcctggtggataacaaaaaggtctttggaactcatctcatgcaagacatggtgaaagatgcacttcggtcttttgtcagtcctccggtgctttcccccaagtgctacctatataataatcaccaggctaaggactgtatcgactcctttgttactcactgtgttcggccattctgtagtcttattcagatccatggacataacagggctcgacagagagataagcttggtcatattcttgaggaatttgccaccttgcaggatgaggcagagaaggttgatgcagcgcttcacaccatgctgttgaaacaggaaccccaaaggcaacatttggcctgtttaggtacctgggtcctttaccataaccttcgcattatgatacagtaccttctaagtggctttgaattggaactctacagtatgcacgagtactattacatatattggtatctctctgaattcctttacgcatggttgatgtcaacattgagtcgtgccgatggctctcaaatggcagaggaaaggataatggaagagcagcagaaaggccgtagtagtaaaaaaacaaagaaaaaaaagaaagttcgcccattgagccgagagatcacaatgagccaagcatatcagaacatgtgtgctggaatgtttaaaaccatggtagcatttgacatggacggcaaagtacgtaaaccgaagtttgagcttgatagtgaacaagttcggtatgaacacaggtttgctccattcaacagtgtgatgaccccgccgccagtgcactacttacagttcaaggaaatgtctgacctcaataaatatagccctcctcctcagtctcctgaactgtatgtggcagctagtaagcactttcaacaggcaaaaatgatattggaaaatattcctaacccggaccatgaggttaatagaattttaaaggttgccaaacccaactttgtggttatgaagttattggcaggaggacacaaaaaggaatctaaagttcctcctgaatttgatttctctgctcataaatattttcctgttgtgaaacttgtttgagagagactggggaggtggccataaaggggcagagtcttctttcagacccaactcttagagggcacatcaccaggctccacatcacgggaagtgagatggatttcttgggtaacaactcattataaggaatacttttagtttgacagccttatatgacatgaatgaaaactgctgttttaaagtggtttattatgttccatggaagaaactggtcttattgaatgcattgatgaacgttatatggttttattacagatttaatcacaaatcattttttatgaatgattgagtgaaaatagtgtttataaaggttaataaatttcttgacaaaaaaaaaatgca

SEQ ID NO: 364 - DNA, 2787 bp, HOMO SAPIENS
gcacagacgagatctcgatcgaaggcgagatggcggacgtgctagatcttcacgaggctgggggcgaagatttcgccatggatgaggatggggacgagagcattcacaaactgaaagaaaaagcgaagaaacggaagggtcgcggctttggctccgaagaggggtcccgagcgcggatgcgtgaggattatgacagcgtggagcaggatggcgatgaacccggaccacaacgctctgttgaaggctggattctctttgtaactggagtccatgaggaagccaccgaagaagacatacacgacaaattcgcagaatatggggaaattaaaaacattcatctcaacctcgacaggcgaacaggatatctgaaggggtatactctagttgaatatgaaacatacaaggaagcccaggctgctatggagggactcaatggccaggatttgatgggacagcccatcagcgttgactggtgttttgttcggggtccaccaaaaggcaagaggagaggtggccgaagacgcagcagaagtccagaccggagacgtcgctgacaggtcctctgttgtccaggtgttctcttcaagattccatttgaccatgcagccttggacaaataggactggggtggaacttgctgtgtttatatttaatctcttaccgtatatgcgtagtatttgagttgcgaataaatgttccatttttgttttctacatttaatgttactttcctgtcctaaaattgaaagttctaaagcatagcaaggctgtatggatcattgtgaagatacttctagggactgaactctatgtatttcttttttttcttttttttgagatagagtcttgctgtgttacccagggtggattgcagctgatcatagctcactgcagcttcaaactcttgggctcaagccatccttctgcctcactgtccctagtagttgggattacaggcacatgccaccatgcccagctaaatttttaatatttttgtagagatggggtcttgctgtgttacctgggctagttatgtgagtttctatattagacatagtctcaagtttcaggtagggtttaaagtagagacactggtcagtatttcttttttggggggaactaggagagcaggagtagaagtgagatgttaagatcttatggcactaaagacttactattctgttcctacatactctgttaggatcagatagatgttatagaaatgccttttgtttctcctgcccttcttgatgtcacagttttttgtacttccagctgtctaaaggcatgaatctcctcttggagcattctcccagacccttctttagaagagtctatactaagttcttggtgccctcttcggcagccaagggtgaaggccccatagaggagaggatccaaaggagcattgaggaggcccaagaggaaaaggatgtggctcaggctgggagggacttcagttagcatggtgggggagaaccagtaccacatacccagtaggtaataaggtgtccagcagaggatgaaggtcagcaagataagcagggccagtctcagggcccggagacgaacacggggacaattgtcaaaggagcgggggagggcaaattcaccagcaggggctaggaatttagaaaatatactgtaattcagacactcagcttctgatctgagtatagggtgaattgatggaggggcatagctagtgagacagagctcgcctcctacaaggaggagaatgttgcaaaccgttttccccttcccaacctgggactatatgatttcttacccccagggattatgatagaaatatgaagccaccaagtctagacttgatggtgttcaagaataaataatactgattgcctccctagtccttgtccagctaactcagctgtttataattgaagggattcaacaaaattatctctagcatcaggtgctagacatggttagaatctcaccatggtttagtgactggtagatagctattaggtaggtagataaataaatgatgctagaggcaacaggtctagggttaaggattaaggcctgggaattggagtctcaccatggctccccttccttgtctggggcctggacacactgaggacaatgcggctatagcagatggccatggcagtcagtggcagcagaaagaggcagcagaaggtgaagaggttataggtggtctcttgccattgagccttgaagctgcctttggtgacacactgagtgaaagggactgggccagctcagtggaccgtgtggaacaggaacagctggagtggagttgaggactattagaactggttcccctcaccacccaacctacccacctatgtcatactgtctcctcccaattcatccttaattccaagtgaagcagcacagtgctgagaaacagttcatccatggtgccatgttaaagaagttggaaatatatcttgaaaatcctatcttccttttaggcttgaatatgatgctgaacagtaagtttgttaaatcttggaacttaaaacaatcctgctttctcaagtactattctaacattgcgctttataagggatgatatttctaccacctcactcatatttttagctgaaatgattttcctggtatgtctgttattttgtggaaaaagaaatattgtgtaaaatgggtgctgccaaaattccaggccattttgcagggactctgaagtgacctttagtagtaatagtcttatgtgcagtaactataatggtaaagaatgttaaataataaaatttaacattttccaaatgct

SEQ ID NO: 365 - DNA, 5431 bp, HOMO SAPIENS
gggggctttgtgcgcggcggcggcgggagaggcggcggcggcggccagcacggaggcggaggccgagggggctgtgcacaggtcgccgcggagaggcgtgcgaattccgagccgagcgccgaggaccgtgctacccaggccgggctgccagccgcaggctcctctctggcagcagcggcggcgcggcgacccccgtccctcggcctccccttcccatcccacctcccgagccttcctcttcccgcagcacgcccggcccggcccggccgtggccctcctcagtgccggccgccatggcagaggcgtccggcgcggggaaaatctagcccggggatttcatgcggcctagctcggttccgcctcctcctcgcgcggccccagcggctgcccgcaccccagccccactccgggcctccgtgtctctcctgtgatcgcactgacacggccggggggttagaatggaacaaactgaaggcccgatgagagaaagggaaagttaaggatgctggagcagaacaatggatttctctttctctttcatgcaagggatcatgggaaacacaattcagcaaccacctcaactcattgactccgccaacatccgtcaggaggatgcctttgataacaacagtgacattgctgaagatggtggccagacaccatatgaagctactttgcagcaaggctttcagtacccagctacaacagaagatcttcctccactcacaaatgggtatccatcatcaatcagtgtgtatgaaactcaaaccaaataccagtcatataatcagtatcctaatgggtcagccaatggctttggtgcagttagaaactttagccccactgactattatcattcagaaattccaaacacaagaccacatgaaattctggaaaaaccttcccctccacagccaccacctcctccttcggtaccacaaactgtgattccaaagaagactggctcacctgaaattaaactaaaaataaccaaaactatccagaatggcagggaattgtttgagtcttccctttgtggagaccttttaaatgaagtacaggcaagtgagcacacgaaatcaaagcatgaaagcagaaaagaaaagaggaaaaaaagcaacaagcatgactcatcaagatctgaagagcgcaagtcacacaaaatccccaaattagaaccagaggaacaaaatagaccaaatgagagggttgacactgtatcagaaaaaccaagggaagaaccagtactaaaagaggaagccccagttcagccaatactatcttctgttccaacaacggaagtgtccactggtgttaagtttcaggttggcgatcttgtgtggtccaaggtgggaacctatccttggtggccttgtatggtttcaagtgatccccagcttgaggttcatactaaaattaacacaagaggtgcccgagaatatcatgtccagttttttagcaaccagccagagagggcgtgggttcatgaaaaacgggtacgagagtataaaggtcataaacagtatgaagaattactggctgaggcaaccaaacaagccagcaatcactctgagaaacaaaagattcggaaaccccgacctcagagagaacgtgctcagtgggatattggcattgcccatgcagagaaagcattgaaaatgactcgagaagaaagaatagaacagtatacttttatttacattgataaacagcctgaagaggctttatcccaagcaaaaaagagtgttgcctccaaaaccgaagttaaaaaaacccgacgaccaagatctgtgctgaatactcagccagaacagaccaatgcaggggaggtggcctcctcactctcaagtactgaaattcggagacatagccagaggcggcacacaagtgcggaagaggaagagccaccgcctgttaaaatagcctggaaaactgcggcagcaaggaaatccttaccagcttccattacgatgcacaaagggagcctggatttgcagaagtgtaacatgtctccagttgtgaaaattgaacaagtgtttgctcttcagaatgctacaggggatgggaaatttatcgatcaatttgtttattcaacaaagggaattggtaacaaaacagaaataagtgtcagggggcaagacaggcttataatttctacaccaaaccagagaaatgaaaagccaacgcagagtgtatcatctcctgaagcaacatctggttctacaggctcagtagaaaagaagcaacagagaagatcaattagaactcgttctgaatcagagaaatccactgaggttgtgccaaagaagaagatcaaaaaggagcaggttgaaacagttcctcaggctacagtgaagactggattacagaaaggtgccagcgagatttcagattcctgtaaacctctaaagaaaaggagtcgcgcctcaactgatgtagaaatgactagttcagcatacagagacacatctgactccgattctagaggactgagtgacctgcaggtaggctttggaaagcaagtagatagcccttcagctactgcagatgcagacgtttctgatgtgcagtccatggattcaagtttgtcgagaagaggcactggaatgagtaagaaggacactgtatgtcagatttgtgaaagctctggtgactctctgattccttgtgagggagagtgctgcaaacactttcacctggagtgcctgggattggcatcacttcctgatagcaagttcatctgcatggaatgtaaaactgggcagcacccatgtttttcgtgtaaagtgtctggtaaagatgtgaagcgttgttctgttggtgcttgtgggaaattttatcatgaagcctgtgtccgcaaattccccactgccatctttgaatcaaaaggattccgctgtcctcagcactgctgctctgcctgctctatggagaaagatatccacaaagcaagtaaaggccgcatgatgagatgtttaagatgtccagttgcctatcactctggagatgcttgcattgcggccggaagcatgttagtatcctcctacattctcatctgtagtaatcattccaaacggagcagtaattcttctgctgtaaatgtaggcttttgtttcgtttgtgccagagggctgatagttcaggaccattcagaccccatgttcagttcatatgcctataagtcccactacctactgaatgaatcaaatcgtgctgagttgatgaaattacctatgattccttcttcgtcagcttccaaaaagaaatgtgagaaaggtggaagattgctctgctgtgaatcgtgcccagcttccttccacccggaatgcctaagcatagaaatgccagaaggctgctggaattgtaatgactgtaaagctggcaagaaactacattacaagcagattgtttgggtcaaattgggaaattacagatggtggccagcagagatctgcaaccccaggtctgtgccactgaacatccagggccttaaacatgacttgggggacttccctgtattcttctttggttctcatgactactactgggtacaccagggcagagtgttcccttatgttgaaggagacaaaagctttgctgaagggcagactagtattaacaagaccttcaaaaaggcactggaagaagctgcaaaacgtttccaggaattgaaagcacaaagagaaagtaaagaagccctagagattgaaaaaaactcaagaaaaccccctccctacaaacacatcaaagctaacaaagtaataggaaaggtgcagatccaggttgctgacctgtcagagattccccgctgtaactgcaagccagctgatgaaaacccttgtggcttggaatcggagtgcctgaacagaatgttgcagtatgaatgccacccgcaggtgtgcccagctggagatcgttgtcagaaccagtgctttacaaagagactataccctgatgcagagatcatcaaaacggagcggagaggctggggcctcaggaccaaaaggagcattaagaagggtgaatttgtaaatgaatacgtcggtgaattaattgatgaagaagaatgcagattgcgaatcaagcgagcccacgagaacagtgtaactaatttttatatgttaactgttaccaaggaccgtataattgatgccggcccaaaaggaaattattctcgcttcatgaaccacagttgtaatcccaactgtgaaacacaaaagtggacagtgaatggagatgttcgagtgggactatttgctctctgtgatattcctgcagggatggagttaacatttaattataacctagattgtctgggcaacggcagaacggagtgccactgtggagcagataactgcagtggttttctaggagtgcggccaaagtcggcatgtgcgtcaacaaatgaagagaaggcaaaaaatgctaagttaaaacagaagagacgaaagatcaaaacagaaccaaagcagatgcatgaagattactgttttcaatgtggagatggtggagagctggtcatgtgtgacaaaaaagactgtcccaaagcataccacctcctatgccttaacctgactcagccaccatatggaaagtgggagtgtccgtggcatcagtgcgatgagtgcagcagtgcagctgtttccttctgtgaattctgtccacattcattttgtaaagatcatgaaaagggggccctggttccctctgcactggaaggccgcctctgctgctcggaacatgaccccatggctcctgtgtcaccagaatactggagcaagataaaatgtaaatgggaatcacaagatcatggagaagaagtaaaagaataaatgtgtggtgtcccctcctttctatttaagtgaaaaaagcaaatagatcatgcatttaaaaagaagagactgctacagtgcatacagcctttgccatcggaactgccttattaaagcaaaaatgggaaaccagttcatgcaggcagaagcagttggtggtgtctggtttttgtttgatttggttggtttgggattcttttgtggagggttaaattcccttggtcttttcttgccttttattgtgcttcagtgccattgcagcttgaaaaagaaatgtttttgctgttaaaataagaacaaagagaaaagtaagttttgttaatgagataaatttaaagtctaagatgtgttccttggttgtataaagcaaaagtagccatcattcctttatttattttcatttttaggaatttcaagaagtgtagttcaatagtctaatcaagtgtgtgtgtgttttaagtaggaatctgagaaagccctctaggaaagggtatgataagctttatatacctctttactgagcagtaggtaggctcacttctctttcccttcaaaatgcttttcataggcttagagaagggctctatggaagtattaaa

SEQ ID NO: 366 - DNA, 1665 bp, HOMO SAPIENS
cacgaggaagacgtggatggcgggaattctcgcttctggcctgggtgagctagaagggagaagcaaggacattggagtccctatcaccggttgcctagacaacttcatgggaaggcccttgggaatctgagatggagcaggcgaaccctttacgtccagatggcgagtccaaaggaggtgttttagctcacttggaaaggctagagacccaagtgagcagatcccgtaaacagtctgaagagctgcagagcgtgcaggcccaggaaggtgctcttggaaccaagattcataaactaaggcgtctgcgagatgagctgagggctgtggtgcggcaccggcgagccagcgtgaaagcatgtattgccaatgtagaacccaaccaaacagtggagatcaatgagcaagaagcattggaagagaaattggaaaatgtgaaagccattctgcaggcatatcattttacaggcctcagtggtaaactgaccagccgaggagtttgtgtctgcatcagtactgcttttgaggggaacctattggattcctattttgtggaccttgtcatacagaaaccactccggatacatcaccattcagtcccagtcttcattcccctggaagagatagctgcaaaatatttacagaccaacatccagcacttcctgttcagtctctgcgagtacctgaatgcttactctgggaggaagtaccaggcagaccggcttcagagtgactttgcagccctcctgactgggcccttgcagagaaacccactgtgtaacttgctgtcatttacttacaaactggatccagggggtcagtccttcccgttctgtgctagattgctgtataaggacctcacagcaactcttcccactgacgtcaccgtgacatgtcaaggagtggaagtattatccacttcatgggaggagcaacgagcatctcatgaaactctgttctgtacgaagcccttgcatcaagtgtttgcctcatttacaagaaaaggagaaaagttggatatgagtctggtctcctaatagattgttttcactgcactgggagcacatcagagaaataaatcccccctcccctgccaggtgaaaggaaatattgcactttctgttctcatgactaaggggacaggagttccagaagaacctttcaagatgatcaggaacaccaggacgagggccgtctcacctcactcggaccacatggagacctcccttcaaaatgggagccatgtcctgccccaccaagccctgtctgaagtggagcttccccgcctgtgctccctccacagtcccggaaagcccagcggcaaaggcagctttgtcccagctctgccaccctcctgctcacagtggtcagggcccctcaggggcaaggacggcagggattggaacgagggctctggaaggactgttcagccctatgcctaagacccctatgctggggacactacaggcacacagaggaatagcagggccaccctcagagctcacacatccacgaacaaatgaaggctgaggaggtttctaaacctaaagtccatgagtgtgcacttcaatccaggaaggtcgggacttccttcagtttcaaaaaataaattctcccttccggtttggactgttaaaaaaaaaaaaaaaaaaaaaaaaaaaaaaaaaa

SEQ ID NO: 367 - DNA, 2805 bp, HOMO SAPIENS
gaatcttcctagttctagtggttggacaagtctttaactccatagcctagctccagctaggttcatgagctggccctactgctctctcctttccccttttcctcttatcccattgcattagtctggattcttgcttacagataaccaaaaccttagtcaatctgatttaagcaaaaaccagaattgataggctcacataactgaaattccagggtagaccctaaggccgggctggatgcagggactcagtcatctcactcgggctaggtctctctcaatgcctagtccctatttcatctgagttggcttccctctcaggtgggctttttctcatggagatcctcagcagcccatggaaggagagtctgtttttcccatcatcttgtacaagtccccaggttgagtctcattggcctgctggccccatgcccatccctgaacaatactgcaattggtcacctgcagtcacatgccctgtgactgcaggaaggtggggatgggctagttacccaaaggaaagtccaggtgctgtgcccagaagggagaatggatgtggggcagagcaaaccgtagatgtctaccttacccagccagacaagactgcatgtaagaaccaggcttacgggccagcccctctctgcaggcccacactgtacactcctgaaatgccattccttagtctggccaaccctcattcacccttccaatctcagcttatatagatggctccccatgctgcctaggaactaccccacattgcactcccatctctgcatgctccctggaggcagggaggaggttttgtccacctctatatccccagtctctggcccacatcagtgttttcagtaagtgttagtgtgttagtggcatcacttccaactgatatacctccttggtactacccttcccagacttaggaggccatctttggacaatggtgtatggtgggaaagtgctcagcaaggaggctctccttccatcctaggaccctgggccagttgtttcacctccggtcctcataccccagactgtgctgatacggttttccttcctaccccacaagataggatcaaatgagatgctgtgtggaaagccctctgacatacacagatatgaggggttgtttggattaggggtggaggcagcaggatgagcagaaaggaaactgcacagtgtccccaggaggccatggttaggttatctccaactatgagatacaggagacagaaagtatccaaccaggacaatgtgaccaaactaaagtgagaaaaatgtaggctttggggcagtgtaagtgggtatatcttctgtgaatagcaatttggcaaaatccattacatttcagagcaagcacattctttgacctgaaattccatgcccaggagtttatataagagagacagtgatgagcaaagatttatttgctgaagtgttacttaccatagcagaagattgaaaatgacccaaatgcacgtcctttggggataaataagttagagcatatctaaacaagaaaatattacgtaaaataaattggaggtctccacaaaaaaaaaaaaaaacccattttttttcagacaggatctcacaccgttgcccaggctggagggcagtgacgtgatcagagctcactgcagcttcaacaccccagggctcgagcagttgtcccacttcagcctcccaaatagctgggactacaggtctacaccaccactcccggctaattttttaatattttgtaatgacagggtctccatatgttgcccaggctggtctcgaactcctggcctcgagcagtcttcctgcctcgggctcccaacatgctggcattacaggtatgagccaccgcgcccagcccatctcacttctgaaaatgactcagtgccatgaacccttcatccctagtggcctttgggggtgggaggtcttcaaagtacagccgtctctttctacctaatgtgtgtctgcaacatcgaacttgttcatcataagtacgtattacttctgtaaccaggaaaagttacaagaagagggggccaggcacagtggctcatgcccgtaattctcacattttgggaggtcgaggcaggagtattgcttgagcccggaagttcgagaccagctttgggcaacacagtgagacctcatctctaaaaaaaagttcttttaattagctgggcatggtggtgtgctgcgtgcctgtggtcccagctacttggaaggctaaggtaggaggaggattcctttagcctggaggtcaaggctgcagtgagccatgttcatgacactgcactccagcctgggtgatagagtgagaacttgtctcaaaggaaagaaaaaaaaaataagaaaatgttgggttctcagcacttccagcccacccccatccatatacattccagcacattgttggggccatttgcaagctctgagatgagattctgcacaagtcagcagtgcagagactcccagggaaggcctgaggccgccaagagcaactctgcagggtctgctccaagaggcagaggtgggccccaccgtccttggcaaaatggagattggtctgagggttccatgaggcaggcttgcaggagcaagggagtgatagaaagccatgtgaggggacgagagggaggacaccctcccctgcagaagtcaggaaggtctttgagcttgttctgagaggaaaacccattctctgggtagaggaatgaagactcagaggagactggggttcgctttgtgtgatactgatatggttactgaaaggctagcccagtcccaggctacgtgaacagactt

SEQ ID NO: 368 - DNA, 1989 bp, HOMO SAPIENS
ggcggtgctgcagggctggtccgggaggtgacgaccggcttcggagagtctatcatggcagctcggactggtcatacggccttgagaagggtagtctcgggatgccgtccgaagtcggcgacagcggccggggcgcaggcgcccgtgcggaatggcagatatttagcttcctgtggtatactgatgagcagaactcttccactacatacctcaattttgcctaaggagatatgtgcacgaactttcttcaaaatcactgcaccattaataaacaaaaggaaagaatattcagagagaagaattttaggatattcaatgcaggaaatgtatgatgtagtatcgggagtggaggattacaagcattttgttccttggtgcaaaaaatcagatgttatatcaaagagatctggatattgtaaaacaagattagaaattggatttccacctgtgttggagcgatatacatcagtagtaaccttggtgaaacctcatttagtaaaggcatcttgtactgatgggagacttttcaatcatttggagactatttggcgttttagcccaggtcttcctggctacccaagaacttgtaccttggatttttcaatttcttttgaatttcgatcacttctacattcccagcttgccacactcttttttgatgaagttgtgaagcagatggtagctgcctttgaaagaagagcatgtaagctgtatggtccagaaacaaatatacctcgggagttaatgcttcatgaagtccatcacacataaaggcaaaaaagaactggtgccacctgcttctgactttagtttgttcacttttaggaagtattttcatgacatgttttcagaagccagaaagcatttgttaaacgcagctttggttataaacctgcaccattgaaaatttgcacatagaatatagactcacttgtacatagaattatttcttcaagtataattcaaaataatatggacattatcatgttctgcattacaataatgggatgtcatcaccattgctagaatactggcatgattcttctgagcagaagttgaaactgtaaatttaaaccttttaattatcaccttacctgaaagaggttagttaagatattcacacagtatgtattatattaaccatatcacacttaagttattaaattcagactatttgtaacttattgttatagggcctgccgtatggcttaggatatttgagtaatcatatatttaaagtaaaaactttgggctgggcacagtggctcacacctgtaatcccagcacttggggaagctgaggtgggcagatcagttgaggtcaggagttctagaccagcctggtcaacatggcgaaaccccatctctactaaaaatacaaaaattagctgggcgtggtggcacacacctgtaatcccagttacttgggaggctgaggcacaagaatcgcttgaacccgggaggcggaggttgcagttagccaagatcgccctgctgcactccagcctgggcaacagagggagactctgtctccaaaaacaaaaacaaaaactgttagtgaaggttccctgggacttttgatattttaaaaattgttcttatgactagtagataaattcattgccataatgaggctagctcccagataaacagtgtattttcttctttttttttttttttttggtgagtggtccagagctttaagctacttttccagtagtttgccactttctccgaggtagtttggctgctctttcagtaatgctaattgtgtgtcaaattttgtctacaacagtaggcaacagatgaagataagttggttgaatgtctccagcactatgcatccctattttctatttattgtgtacactcactttcagtaatgtgtttcaaactggtattttttaaaaaacaaatcaatgtaaggactgaagttgaagtagcaatgtaataaagttaatttgtttattttttgaaaaaaaaaaaaaaa

SEQ ID NO: 369 - DNA, 2150 bp, HOMO SAPIENS
aagaaaggtaagggccctgggcgaggaaagcgcggccctttccgagtttggtgttttgcagcgaaaggaaatctcgctcttccgaaagtcctccagggcgagagaggaaagggcctagaatacctcctctgaaaaatggcagaagcagttttccatgccccaaagaggaaaagaagagtgtatgagacttacgagtctccattgccaatcccttttggtcaggaccatggtcctctgaaagaattcaagatattccgtgctgaaatgattaacaacaatgtgattgtgaggaatgcggaggacattgagcagctctatgggaaaggttattttggaaaaggtattctttcaagaagccgtccaagcttcacaatttcagatcctaaactggttgctaaatggaaagatatgaagacaaacatgcctatcatcacatcaaagaggtatcagcatagtgttgagtgggcagcagagctgatgcgtagacaggggcaggatgagagtacagtgcgcagaatcctcaaggattacacgaaaccgcttgagcatcctcctgtgaaaaggaatgaagaggctcaagtgcatgacaagcttaactctggaatggtttccaacatggaaggcacagcagggggagagagaccttctgtggtaaacggggactctggaaagtcaggtggtgtgggtgatccccgtgagccattaggctgcctgcaggagggctctggctgccacccaacaacagagagctttgagaaaagcgtgcgagaggatgcctcacctctgccccatgtctgttgctgcaaacaagatgctctcatcctccagcgtggccttcatcatgaagacggcagccagcacatcggcctcctgcatcctggggacagagggcctgaccatgagtacgtgctggtcgaggaagcggagtgtgccatgagcgagagggaggctgccccaaatgaggaattggtgcaaagaaacaggttaatatgcagaagaaatccatataggatctttgagtatttgcaactcagcctagaagaggcctttttcttggtctatgctctgggatgtttaagtatttactatgagaaggagcctttaacgatagtgaagctctggaaagctttcactgtagttcagcccacgttcagaaccacctacatggcctaccattactttcgaagcaagggctgggtgcccaaagtgggactcaagtacgggacagatttactgctatatcggaaaggccctccattttaccatgcaagttattctgtcattatcgagctagttgatgaccattttgaaggctctctccgcaggcctctcagttggaagtccctggctgccttgagcagagtttccgttaatgtctctaaggaacttatgctgtgctatttgattaaaccctctactatgactgacaaggaaatggagtcaccagaatgtatgaaaaggattaaagttcaggaggtgattctgagtcgatgggtttcttcacgagagaggagtgaccaagacgatctttaacaattcaacctcaaatttctaatttcaccaacaactatttattgagggctaggtaaaaagttctttttgttgtaatcgtccattaattcataagttttaaagggcatggtgctcccagcaccagaaaactatcagtgtttttaaagataaattacacaagggaggagaaagatccctgtgctaggactgcagattctatacttgcgttggcctctaactctccaatccagagcctcctgcctctggcgtcagtcttttccctcatccactcactggggagattggactagaggagtcctgagaggacacttccaacaagagacatttattctctgattttacctgaaaatggtagtagtttacatttatacagtacagtttatgaagcactttcatacgcaggcatctcttgttacctacatctaagctgttcccgaaagagtgttacagaacacaacagtattgtacaatattcgataagcatatcttcactgcacttgttataaaaatgagtggtgaaataatgtttggagacataatgaaagcgattaacatttggcaaaatataataaagcctttttgtaattggtgagaaagtcaaaaaaaaaaaaaaaaaa

SEQ ID NO: 370 - DNA, 2506 bp, HOMO SAPIENS
gagggcaggaagcccacggcccacaggggtgtagcccgagacccacctgcagcccccagcccttgccaggaaagcagcagccgcagccatggcggggatgaagacagcctccggggactacatcgactcgtcatgggagctgcgggtgtttgtgggagaggaggacccagaggccgagtcggtcaccctgcgggtcactggggagtcgcacatcggcggggtgctcctgaagattgtggagcagatcaatcgcaagcaggactggtcagaccatgctatttggtgggaacagaagaggcagtggctgctgcagacccactggacactggacaagtacgggatcctggccgacgcacgcctcttctttgggccccagcaccggcccgtcatccttcggttgcccaaccgccgcgcactgcgcctccgtgccagcttctcccagcccctcttccaggctgtggctgccatctgccgcctcctcagcatccggcaccccgaggagctgtccctgctccgggctcctgagaagaaggagaagaagaagaaagagaaggagccagaggaagagctctatgacttgagcaaggttgtcttggctgggggcgtggcacctgcactgttccgggggatgccagctcacttctcggacagcgcccagactgaggcctgctaccacatgctgagccggccccagccgccacccgaccccctcctgctccagcgtctgccacggcccagctccctgtcagacaagacccagctccacagcaggtggctggactcgtcgcggtgtctcatgcagcagggcatcaaggccggggacgcactctggctgcgcttcaagtactacagcttcttcgatttggatcccaagacagaccccgtgcggctgacacagctgtatgagcaggcccggtgggacctgctgctggaggagattgactgcaccgaggaggagatgatggtgtttgccgccctgcagtaccacatcaacaagctgtcccagagcggggaggtgggggagccggctggcacagacccagggctggacgacctggatgtggccctgagcaacctggaggtgaagctggaggggtcggcgcccacagatgtgctggacagcctcaccaccatcccagagctcaaggaccatctccgaatctttcggccccggaagctgaccctgaagggctaccgccaacactgggtggtgttcaaggagaccacactgtcctactacaagagccaggacgaggcccctggggaccccattcagcagctcaacctcaagggctgtgaggtggttcccgatgttaacgtctccggccagaagttctgcattaaactcctagtgccctcccctgagggcatgagtgagatctacctgcggtgccaggatgagcagcagtatgcccgctggatggctggctgccgcctggcctccaaaggccgcaccatggccgacagcagctacaccagcgaggtgcaggccatcctggccttcctcagcctgcagcgcacgggcagtgggggcccgggcaaccacccccacggccctgatgcctctgccgagggcctcaacccctacggcctcgttgccccccgtttccagcgaaagttcaaggccaagcagctcaccccacggatcctggaagcccaccagaatgtggcccagttgtcgctggcagaggcccagctgcgcttcatccaggcctggcagtccctgcccgacttcggcatctcctatgtcatggtcaggttcaagggcagcaggaaagacgagatcctgggcatcgccaacaaccgactgatccgcatcgacttggccgtgggcgacgtggtcaagacctggcgtttcagcaacatgcgccagtggaatgtcaactgggacatccggcaggtggccatcgagtttgatgaacacatcaatgtggccttcagctgcgtgtctgccagctgccgaattgtacacgagtatatcgggggctacattttcctgtcgacgcgggagcgggcccgtggggaggagctggatgaagacctcttcctgcagctcaccgggggccatgaggccttctgagggctgtctgattgcccctgccctgctcaccacctgtcacagccactcccaagcccacacccacaggggctcactgccccacacccgctccaggcaggcacccagctgggcatttcacctgctgtcactgactttgtgcaggccaaggacctggcagggccagacgctgtaccatcacccaggccagggatgggggtgggggtccctgagctcatgtggtgccccctttccttgtctgagtggctgaggctgatacccctgacctatctgcagtcccccagcacacaaggaagaccagatgtagctacaggatgatgaaacatggtttcaaacgagttctttcttgttactttttaaaatttcttttttataaattaatattttattgttggatcctcaaaaaaaaaaaaaaaaaaaaaaaaaaaa

SEQ ID NO: 371 - DNA, 1040 bp, HOMO SAPIENS
cacatgtaaactacttgaactccatttcatcttttttcataccatctctaagattgctgccgcatttgcttgttaaactgaaagcatgtttcttgcaaaggctctattggaaggagcagatcgaggtcttggagaagctcttggaggcctctttggaggaggtggtcagagaagagaaggaggaggaagaaatattggagggatagttggaggaattgtgaattttatcagtgaggctgcagcagctcagtatactccagaaccgcctcccactcagcagcatttcaccagtgtggaggcctcagaaagtgaggaagttaggcgatttcggcaacaatttacacagctggctggaccagacatggaggtgggtgccactgatctgatgaatattctcaacaaagtcctttctaagcacaaagatcttaagactgacggttttagtcttgacacctgccggagcattgtgtctgtcatggacagtgacacgactggtaagctgggctttgaagaatttaagtatctgtggaacaacatcaagaaatggcagtgtgtttataagcagtatgacagggaccattctgggtctctgggaagttctcagctgcggggagctctgcaggccgcaggcttccagctaaatgaacaactttaccaaatgattgtccgccggtatgctaatgaagatggagatatggattttaacaatttcatcagctgcttggtccgcctggatgccatgtttcgtgccttcaagtctctggatagagatagagatggcctgattcaagtgtctatcaaagaatggctgcagttgaccatgtattcctgaagtgggaactgagaagtcaagatcctccctggaggacaggactgaaaaccttgccaagctgtacacagttgctgataccctgtgcaacagctctcatttcctggcaagctctttcacaaccctacatatttctgatcatgtgctgccttttactgctgaattaaaacagatatttcataaaaaaaaaaaaaaaaaaaaaaaaaaaaaa

SEQ ID NO: 372 - DNA, 2477 bp, HOMO SAPIENS
gagagtagcgcgggagctgagaagttgcagggttgagttggtcccggcaagtccttgagcagtttgttcctctgtcttcccgcttcctggtgccccgactgcgtccccacgaacgccccgtccttaccgccggctgctgtggagtgcctcgctgtctcccaggtccccgagttcctggtttcagagaagatgaccgaagaagtggatttcctgggacaggactctgatgggggtagtgaggaagtggtcctaactcctgcagagctcattgaaagattggagcaggcctggatgaatgaaaagtttgcccctgagctgctggagagcaagcctgagattgtagaatgtgtcatggaacagctggagcacatggaagaaaatctcaggagagccaaaagggaggacctgaaggtcagcatccaccaaatggagatggagaggatccgctacgtcctcagcagctacttgcggtgtcgcctcatgaagatagagaagtttttccctcatgtccttgagaaggaaaaaacacgtcctgagggggagccttccagcctctcgccggaagagttggcctttgccagagagttcatggcgaacacagagtcctatctgaaaaatgtcgccttgaagcacatgccccctaacttacagaaggtggacctctttcgggcagttcccaaaccagatctagattcttacgtgtttctgagagtgagagaacgacaagaaaacatactggtagaaccagacacagatgagcagagggactacgtgattgacctggagaagggctcacagcacttgatccgatacaaaaccattgcacctctggttgcatctggagctgtccagctaatttaaaactaggcataaacagccaggcatggtgactcaagcctgtaatcccagcactttgggaggccgaggcgggcggatcatgaggtcaggagttcgagaccaaccgaccaacatggtgaaaccccatctttactaaaaatacaaaataattagccgggtgttggtggtgtgcacctgtaatcccagctactcaggaggccggggcaggagaatcgcttgaacctgggagcaggaggttgcagtgagccgaggtcgtgccattgcactccagcctgggtgacagtgagactttgtctcaaaaaaaaaaacaaaaaacaaaaaaaaaacaaactaggcataaactcatgaggtcaggagatcaagaccatcctggctactaaaccccatctctactaaacccatctctactaaaaatacaaaaaattagccaggcatggtggcgggcccatctactcaggaggctgaggcaggagaatggtgtgaacccgggaggtggagcttgcagtgagccaagatcgtgccattgcactctagcctgggcgacagagcgagactccatttccaaaaaaaacacactaggcgtaaacaagaatgaagacctggaaccgtagagaaaatactagaaacccctcgtatcacgttgtgcctgaggacaataataaagtagtttactaggcatcagacattcctcagcagtgctgtgggtcacgggcgtgaagcggagctcgaggcaggattgcttgtgttgctgcatgtcctgtctgctgttttagcccgtgtcagtagatggggccattgtactgtttgttctgcacacttggcggagcagcagaggctctcagcacgccttttccctttgtagtattttctgagctaaggaaagtcaggcagaagtagttcataagaaggcatcactgcctgtgatcggggctgcatttagccctgacctgataatggtaggagagttcatttagcctttctgctgcgaagattgtaaatagattaaagaaaacagctgtggccttctcccgtcatacatcattagactgtgtaaactaacattttagaacctctaatattggacttaaaaccaatttctgtcgtgcttaattgaaaatcacaactaaaccaataaaccattattaaatttccattctgcagcagaaggcacctctggacggctcccggcttgtagtttaatgaagtatgtgctccctgctgttaacccgcagccctccccaactctccagcagctttgccaagtcagcctccgggccatctggctgtccttggccaaggcactgttaacggagtgacgttaaccatcttgtattgtgacctgtggccgcttttctggtttaagtccttcactttttcaagaggaatggatgaaattaatgtgcatgcagagtctcacagtgatgccggaaggaaggatgtataggcagtgaatgaatgatctttccttgaaatgctataaaaagcaacctgcattccagtcttttcttcctggttgaagttggcagatttccatttgcagggtatgggctgcgagagtaatcagggtaacattgctgtcatttccaagagaaatcagtaggggaaagcaagggaggtct

SEQ ID NO: 373 - DNA, 1122 bp, HOMO SAPIENS
gtccttagccggtagcttccgggtttcctgggctactacgatggcgatgagtttcgagtggccgtggcagtatcgcttcccacccttctttacgttacaaccgaatgtggacactcggcagaagcagctggccgcctggtgctcgctggtcctgtccttctgccgcctgcacaaacagtccagcatgacggtgatggaagctcaggagagcccgctcttcaacaacgtcaagctacagcgaaagcttcctgtggagtcgatccagattgtattagaggaactgaggaagaaagggaacctcgagtggttggataagagcaagtccagcttcctgatcatgtggcggaggccagaagaatgggggaaactcatctatcagtgggtttccaggagtggccagaacaactccgtctttaccctgtatgaactgactaatggggaagacacagaggatgaggagttccacgggctggatgaagccactctactgcgggctctgcaggccctacagcaggagcacaaggccgagatcatcactgtcagcgatggccgaggcgtcaagttcttctagcagggacctgtctccctttacttcttacctcccacctttccagggctttcaaaaggagacagacccagtgtcccccaaagactggatctgtgactccaccagactcaaaaggactccagtcctgaaggctgggacctggggatgggtttctcacaccccatatgtctgtcccttggatagggtgaggctgaagcaccagggagaaaatatgtgcttcttctcgccctacctcctttcccatcctagactgtccttgagccagggtctgtaaacctgacactttatatgtgttcacacatgtaagtacatacacacatgcgcctgcagcacatgcttctgtctcctcctcctcccacccctttagctgctgttgcctcccttctcaggctggtgctggatccttcctaggggatgggggaagccctggctgcaggcagccttccaggcaatatgaagataggaggcccacgggcctggcagtgagaggtgtggccccacaccgatttatgatattaaaatctcaactcccaaaaaaaaaaaaaaaaaaaaaa

SEQ ID NO: 374 - DNA, 3559 bp, HOMO SAPIENS
aagggtttgcctgcttggtacctgctctggaacttcgagatactaatctggagtggaggggactcgctgtcaggcttgctgttaaccgagaacggctgaaggctgggcgagacgcgggccaatgcgtctgcccgttcgggccggagggacgaggagtgtttgggcagcctaatccttattcatcgatctgtaattagctggagtgggggtccccgcccccagcctcccgcagcctgcgcggcgtgggggcgactccacctgggggttgcggcgtgggaggggcggggggaagggtactacgcgcgcgaggaggtttgggccggtccgcgcgccgtcgccccgccccggctgcggattggcccggcgcggcgttgattcttgcggccgcggttgtcgtcgccgcccccgtcccgccggctgcccattggtccagatcggactccaatcaccccacccctcggctggcccaggcaccgctgaggccggcctggtgagcccgccctccccgccgtggattggcccgcggcgggacccgtcagccgcggttgtgtctgggaaggagagaaaatggcggcggagccgaacaagaccgaaatccagactctttttaagaggcttcgcgcagttccaaccaacaaggcctgtttcgactgcggcgccaagaatccgagttgggccagcatcacgtacggtgttttcttgtgcattgactgttccggggtgcaccgctccctgggcgtccatctgagcttcatcaggtccacagagttggattccaactggaactggttccagctgaggtgtatgcaggtcggcgggaatgccaatgcgacggctttttttcgccaacatggatgcacagccaatgatgccaacaccaaatataatagccgagctgcccagatgtaccgggagaagatccggcagctggggagtgcggccctggctaggcatggcactgatctttggatagacaacatgagtagtgccgttcctaatcactccccagagaagaaggactctgatttcttcacagaacacactcaaccccctgcctgggatgcgccagccactgagccttcagggacccagcagccagccccgtctacagagagcagtggcctggcacagccggagcatggccccaacacagacctgcttggcacctcacccaaagcctcactggagtccgtgtatctgtcagctaaaggggcccttcctgccagagaactgaaaagctccatcattggcaagaagaagccagcagcagctaagaaagggctgggtgccaagaaaggcctaggggcccagaaggtgagcagccagagcttcagtgagattgagcggcaggctcaggtggcagagaagctccgtgagcagcaggcagccgatgccaagaagcaggcggaggagtccatggtcgcctccatgcgtctggcctaccaggagctccagattgatcgtaagaaagaggaaaagaagctacagaatctggaagggaagaagcgagagcaggcagaaaggttgggcatgggcttggtatcccgaagctctgtctcccactccgtgctgtctgagatgcaggtgattgagcaggaaaccccagtgagtgcaaaatcctctcgctcgcagctggacttgtttgacgatgttggtactttcgcctctggacccccaaagtacaaggacaatcccttttccttaggggaaagctttggctcccgctgggatacagatgctgcctggggtatggacagggtagaggagaaggagccagaagtgaccatctcaagcatccggcctatttcagaaagagccacaaaccggagggaagtggagagccggagctcaggcctcgagtctagtgaggcgcgtcagaaattcgcaggagccaaagccatctcatctgacatgttctttgggcgggaggtggatgcggagtatgaggccaggtctcggctgcagcagctctcaggcagcagtgccatcagctcttcagacctctttggggacatggatggagctcacggagcaggaagtgtatctctggggaacgtgctgcctacagcggacattgcccagtttaagcagggtgtcaagtctgtggctgggaaaatggctgtgctggccaatggtgtgatgaattccttgcaggatcgctacggttcctactgatccgagctctgtgactcaggcttacgatggtgacggcaacaagaactccacagttcccaggctggggatgctttgccttgtggaagctggggaggatttgttacttcgtatgtgtggtgtgtgtgtggggtggcctttgaggcgctcactcctgtgaggggaatggtcagtaccagcccttgtcctctgcctgtggactgagccctttattccctctcacaccaccctccgtgtgttagactcttgtccttctgtcctgcccccacagctgctgctcacttatcctgccatactgggaaagggggttcccccacgatggcttattctgggtccagactttccccaggtagggaaagcggaaggtagaaggctttttttgctggctctagggttcttctagttcgaggccttgggtccccatcctctggaaccagggggaggcctggaaggagttcactgtagacccgtcccatggggaaagaggctgcggacttgctgctgctgctgctgccagtggcctcttctgggtgccaggagaggggaaggacctttgtctgggcgttaccaagggctggaaactttacctggtacctaaaggtttcatttgggatcagaccggagacccttgggttctcccgtctcaccacccctttctacagtaagcacttggaagattgtttcagggtgtctcagggtccctctgtaccatctgctgtggaatgcaggaccctctgtgacattctttatcccttcttccccgggttggtggccatggagggtcttgtctgctgtgattcgactctggatgctgtgagcttgatgctggccagggaagcagaggatgtgagaggcagaggcaggctcctggggctgagctccttcctctgcatcattctgggcttggcctggacagcacccgccagtgagagctgtgggcctcaccctctggcagctgagccaagcactgtcattcttggtgccatcttcccctgccgcaccggcagtctcagcccagcccccacctttgggttgtaggttgggctcccaagcaacacagaccactcttccccttgcccctcccccagagggacttgactttctttctggactgtttgtattgaaacaaagtggtgtcaaaataaagcccctgcagggcctggctccctgttggtctgagtgaagcagtgtcctctggatcctgcctccctgcccagtgccggcccctggcctcactctctgggctcccaccggtaatggtagggcgtcggtaccgaagctgaggacactctctccagggcctcctgcttctctcttctctgaaagccaaaggcccctggctccttggctctgtgctgccgtgaggtccggtgcagcttcgacctca

SEQ ID NO: 375 - DNA, 926 bp, HOMO SAPIENS
gctcgtgctgtgacgcaagcctcgcctcgccccgcgccgcgcgcgttgccagggtgatcaggtgactcccggttcgcggcgctgggagcggccgtgacgtcaggcgcccggctgctcctcacttgctctgagacaggtgcggcaagtctactgcgggctggtccgggctcctcaggttcagacccgaccgttatccagtcggttcgtggagaggagaggtgcactttacaggtccccgatgaaccaagagaaccctccaccatatccaggccctggtccaacggccccatacccaccttatccaccacaaccaatgggtccaggacctatggggggaccctacccacctcctcaagggtacccctaccaaggatacccacagtacggctggcagggtggacctcaggagcctcctaaaaccacagtgtatgtggtagaagaccaaagaagagatgagctaggaccatccacctgcctcacagcctgctggacggctctctgttgctgctgtctctgggacatgctcacctgaccagaccagcccagccgtcctgtcctgccagctctgctgccacctctgacaggtgtgcctgcccccatctcttctgattgctgttaacaaatgactagctttgcacagacacctctaccttcagcactatgggattctagattaatgggggttgctactgtttaattcagtgacttgatctttttaatgtccaaaatccatttcttattgatctttaaagatgtgctaaatgacttttttggccaaaggcttagttgtgaaaaatataatttttaaattatacattcaaggtagtggccaaatgtaacacatcaatcatggaatgatttctctgctaacagccgcctgtatgtttcaataaatttgtccaaagctcaaaaaaaaaaaaaaaaaa

SEQ ID NO: 376 - DNA, 3082 bp, HOMO SAPIENS
ctggaggcgccggcagcgcccgccagacccgccagcccagcggcccgggctctggggaaaccggcgctcccgacaggggagcaccgggcctctgagctccctcgggagcctttcacgaggtcagctacgtctttgttgtgcgcgttcctgaacttttggtccattaaccaacaattagacacgccggtattcagtgcctggcgcggtgctagatgctgggtgtaatctcagaaaaatacattcaggggcgcgcctgagggtgctggctgctggcatctcaggtgctttacgtgcattcgtgaagaagcccatcagtatttcttgaataccagaccccaagctaagtgaagctttagcctctaagctcaacatgtatgaagctttgccaggccctgctcctgaaaatgaagatggccttgtgaaagtgaaggaggaagatcccacctgggagcaggtgtgcaactcacaggagggcagctcccacactcaggagatttgccgcctgcgctttcggcacttctgctaccaggaggctcacggaccccaggaagctctggcccaactccgagaactttgtcatcaatggctgagaccggagatgcacaccaaggaacagataatggaactgctggtgctggagcagttcctgaccatcctgcccaaggagctccagccctgtgtgaagacatatcctctggagagtggagaggaggcagtgacagtgctggagaatctagagacaggaagtggagacacaggacaacaggcctctgtctatattcagggacaggacatgcacccaatggtggcagaatatcaaggagtctctttggagtgtcagagcctccagctcctgcctgggataaccaccctgaagtgtgaacctccacagcgtcctcaagggaacccccaagaagtgagtgggcctgttccccacggatcagctcatctccaggaaaaaaaccccagagacaaggctgtagtgcctgtgtttaacccagtcaggtcccagacattggtgaagactgaggaagaaacagcccaggccgttgctgcagagaagtggtcacatctgagtctgactcggaggaacctctgtgggaactcagctcaggagacagttatgagcctcagtccgatgactgaagaaattgtaactaaagatagattgtttaaagcaaagcaagaaacttctgaagaaatggaacaaagtggagaagcctcaggaaagcccaacagagagtgtgcaccccagattccttgtagtactcctattgctactgaaaggacagttgcacatttgaacactctgaaggaccgtcacccaggtgatttgtgggcccgcatgcacatctcatccctggaatatgctgcaggagacattacccgaaaagggagaaaaaaagacaaagctcgagtgagtgaactgctccaaggcctctcattctctggtgactcagatgtggaaaaagataatgagcctgagatccagcctgctcaaaagaagttaaaggtatcatgtttcccagaaaagagttggaccaaaagagacattaaacccaattttccaagctggtcagcactggattctggacttttgaatctcaagagcgaaaagttgaacccagtagagctttttgaattattttttgatgatgaaacattcaacttaattgtcaatgaaaccaataattatgcttctcagaaaaatgtcagcttggaagtcacagttcaggaaatgaggtgtgtgtttggtgtcttacttttgagtggatttatgaggcatcctagaagggaaatgtattgggaagtctctgacaccgatcagaacctggttagagatgcaatcagaagggacagatttgaattgattttctcaaacctgcactttgcagataatggccacctagatcaaaaagataagtttacaaagttgagacctctcataaaacaaatgaataaaaatttcctcttgtatgctcccctggaagaatactattgctttgataagtcaatgtgtgaatgctttgatagtgaccaattcctgaatggaaagcctattagaattggctataaaatttggtgtggtacaaccacacagggttatctggtttggtttgaaccctatcaagaagaatcaactatgaaggtagatgaggatcctgatcttgggttaggtggaaatctagtgatgaacttcgctgatgttcttttagagagaggtcagtatccctatcacctgtgttttgatagcttctttacaagtgtcaaattgttgtcagccttgaaaaagaagggggtgagggcaacaggaacaattcgtgagaacaggaccgaaaaatgtccccttatgaatgtagaacatatgaaaaaaatgaagagagggtattttgatttccgaatagaagaaaacaatgagataattttgtgtcgttggtatggggatggcattatcagtctgtgctccaatgctgtgggcatagaaccagtcaatgaggtaagctgttgtgatgctgataacgaagaaatccctcagataagtcaaccatccatagtaaaagtgtatgatgaatgcaaggaaggtgtagctaaaatggatcaaattatttcgaaatacagggtgaggataagaagcaagaaatggtactcaattttggtgagctacatgattgatgtagccatgaacaatgcatggcaactacacagagcctgtaacccaggtgcttctctagaccccttggattttcggagatttgttgcacatttctacttggaacacaatgctcatctgtcagattagggtacataaaatggacatagtgcagacattaataagacatagaaaaataataattatacatgctgttgtaccctcccaaagtaaatctgatatatgtaatgaagttattaaataatacttttaaaaatcagacatttatatagagtttcaaagactattgtaacaagtaatgttaaaaattgtctgtgagaatgttgaactgtagtacctttctctatgtcaagttttgtgtcagacatgggaaatcatgtatttgttcaattgaaaaaaaaaaaaaaaaaa

SEQ ID NO: 377 - DNA, 968 bp, HOMO SAPIENS
tgtgtatcagattcaactaggagaaaatcccacctccaggctccattaatccttccaatggagtggaagtttctctcacagagaaactagtaaggggatccaatgggaaaagaacgttcacacggactagaagacgaaaccaatggaatggaaaattgtcctcgcgttggtagaagcagccaatgagatgaaaagagcccgcctccaaagtggctgcagaggcaatggggtgaatcgtgctcagaggcgcgctccaatggggtagcagggctcgcccggccgccactaccccgcttccccgcgcccggagtccccacccacggccggccgcggagccgagtgctgacccgggtgagaggttcccgcggctcagggaagatggcggcagccgtggtgctggctgctgggttgcgcgcggcgcgcagagccgtggcggccacgggggtgcgcggggggcaggtccgaggagctgcaggtgtgactgatgggaatgaagtggccaaggcccagcaggcaactcctgggggagcagccccaaccatcttctcccggatcctggacaagagcctcccagctgacattctctatgaggaccagcagtgtcttgtgttccgtgatgtggcccctcaggctcctgtgcacttcctggtcattcctaagaagcccattcctcggattagccaggctgaagaagaagaccagcagcttctaggacacctactccttgtggccaagcagacagcaaaggctgagggcctgggagatggataccgacttgtgatcaacgatgggaagctgggtgcacaatctgtgtatcatctgcacattcatgtacttgggggccggcagctccagtggcctccaggttgaacctgccaactgattaaaggacaccagactctggatgcttggatggaaagggaaaaatggaccctgtgatgctaataaaactgttctcccttaattat

SEQ ID NO: 378 - DNA, 2046 bp, HOMO SAPIENS
ccaatcgctagcaaactccctgcctagcaaggcccagcctggggcagaaatggctgcaagtggccgaggtctctgcaaggctgtggccgcctctcccttcccggcgtggagacgagataacacggaagccaggggaggtctgaagcctgagtatgatgcggtggtgataggagcaggacacaacggactggtggctgcagcgtacctgcagagactgggggtgaacaccgccgtcttcgagaggcgccatgtgatcgggggtgcagctgtcactgaggagatcatcccagggtttaagttctcccgtgcgtcctacctgctcagcctgctgaggccgcagatttacactgatctggagctgaagaaacatgggctgaggcttcatcttcgaaacccctactccttcacccccatgctggaagagggtgcaggcagcaaggtgcccaggtgccttctgctgggcacagacatggcagaaaaccagaagcagatcgcccagttctcccagaaggatgcccaggtctttcccaaatatgaggagttcatgcatcgcttggcattagccattgaccctctgctggatgcggcccccgtggacatggcggccttccagcatggctccttgctgcaaaggatgaggtcgctctccaccctcaagcccctgctgaaggcaggccgcatcctgggagcccagcttccccgatattatgaggtcctcacagctcccattaccaaggtgctggatcagtggttcgagtctgagcctttaaaagccactctagccacagatgcagtgattggagccatgacaagtccccacactccggggagtgggtatgtgctgctgcaccatgtgatggggggcctggagggaatgcagggggcctggggctacgtccaggggggcatgggtgccctctctgatgcgatcgcaagctcagccaccacacatggagcaagcatcttcactgaaaagacagtggcgaaggtgcaggtgaacagtgaaggctgtgttcaaggagttgtgctggaagatggcacagaggtgagaagcaaaatggtgctgtccaacacatcaccgcagatcaccttcctgaagctgacgccacaggagtggcttcctgaggagttcctggagagaatctctcagctggacacccggtcgcctgtcaccaagatcaatgtggccgtagacaggctgcccagcttcctggcggcccccaatgctcccaggggccagccgctgccccatcaccaatgctccatccacctgaactgtgaagacaccctcctccttcatcaggcctttgaagatgccatggatggcctgtcttcccacaggcctgtgattgagctctgcatcccttcctcgctggaccccaccctggctccccctggctgccatgtagtctccctcttcactcagtacacgccctatacgctggctggaggcaaggcctgggacgagcaggagagagacgcttatgcagacagagtgtttgattgcatcgaggtctatgcccctggcttcaaggactctgtggttggcagagacatcctcacaccaccagatttggagagaatcttcgggcttcctggagggaacatattccactgcgccatgtccctggaccagctctacttcgcccgccccgtgcccctgcattctggctaccgctgccctctccagggcctgtatctctgtggaagtggggctcatcctggaggaggtgtgatgggagctgctgggcgaaatgcagcacatgtggcctttagggacctcaagagcatgtgaccctgaaccagctctgacccaggaagaagactccacccctgaattccaagtgctccattggatcagcttcccaggaagttcagcttcgggttagtacataaggccaccacaatgctcaagaaattattttagaaaaaacgtacgagttacatttagtgcaagttgaccttatgcccatgcctccatacatggactggttctgttttattaaaactaatatttcatacagataaaaaaaaaaaaaaaaaaaa

SEQ ID NO: 379 - DNA, 2679 bp, HOMO SAPIENS
gggtggaagtgacgctgcccccgctgcccaaaatgtcggcgcccagagggaggtagagagcccccacataccactgtattccccgccaccatggatgacgtccccgccccaacccctgcaccagcaccgcccgccgctgccgcccccagggtcccgtttcactgcagtgaatgtggcaagagcttccgctaccgctcagacctgcggcgccactttgcccggcacacagcgctcaagccccacgcatgtccgcgctgcggcaagggtttcaagcacagcttcaacctagccaaccacctgcgctcgcacaccggggagcggccctaccgctgctctgcctgccccaaggggttccgcgactccaccggcctgctgcaccaccaggtcgtccacactggtgagaaaccctactgctgcctggtctgcgagctccgcttctcctcacgctccagcctgggccgccacctcaagcgccagcaccgtggggttctcccctctcccctgcagcccggccctggcctgcccgccttgagtgcgccctgctccgtctgctgcaatgtggggccctgctcggtgtgcgggggctcaggggccggcggcggagagggccccgagggggcaggcgcgggtctgggcagctgggggctggcagaggcggcagctgcggccgcggcctccttgcccccatttgcgtgcggcgcctgcgcgcggcgcttcgaccacggccgcgagctggcggcccactgggcggcgcacaccgacgtgaagcccttcaagtgcccgcgctgcgagcgcgacttcaacgcgcccgcgctgctggagcggcacaagctgacgcacgacctgcagggcccgggcgcgcccccagcgcaggcctgggccgcggggccaggcgcagggcccgagacggcgggcgaaggcaccgctgcggaggcgggcgacgctcctctggcttcggaccgcaggctgctcctgggccccgcggggggcggcgtgcccaagctcggggggctgctccccgagggcggtggggaggcgcctgcacctgcggcggccgccgagccctcggaagacaccctgtaccagtgcgactgcgggaccttctttgcgtcggccgcggccctggccagtcacctggaggcccactcgggcccggccacctacggctgcggccactgcggggctctgtacgcggcgctggccgccttggaggagcaccggcgggtcagccacggtgagggcggcggggaggaggcggcgaccgccgcccgggaaagggaaccggcgtccggggaacccccgtctggctccggccgcggcaagaagatcttcggctgctccgagtgcgagaagctgttccgctcaccgcgagacctggagcggcacgtgctggtgcacactggcgagaagccgttcccgtgcctggagtgcggcaagttcttccgccacgagtgctacctcaagcgccaccggctgctgcacggcaccgagcggcccttcccttgccacatctgcggcaagggcttcatcacgctcagcaacctctccaggcacctgaagctgcaccggggcatggactgactgccaggctgcgtgcgccctgccctccacccagcctcctggactcggcctggaccaggggacctcgggactgcgcgtgaggccccggccctccaaatccaaatccagacgcaggccctgaaatgaggggaccctgactggagaggtgggggccaccaaaaacccacaaaggccccggagctgggggaccacaaacaaacagggtccttagctggggcaggggagcccaaatctagggagagactcctgagcctgaggtccctggaatgagtgtgggtagccgtaagtccccaagacatggggactttgcagtgagcaatgggtctccacaagtacctctcatcttgagagccctaatactaaaagatgggcacccacccccaccaagggaagactgccccattccctgagagccatcattcctaacgaccttgatctggagaatgtggagggagcatgtccctgaattttcctagatccctccaaatgccacccaccagagtcactggtgaccccagaaaatggatatagccgaaatctgcctttcccctttttcattccctgtgctgaaagagggaccagggtagatgccccctgccctcgaatcccccctccccgactgtggaatggatcgaccctaacgatcttccccgccccaaacactagaatagactggcctgaaatccccttgcccagtagaatggactgatctatgtgcacacacccccatcacatggaatgggctggtctaggctgtggcctgccaccttccttagagtgaatagggcggacactcctctcttttcctgtagcgtgtggaccggtccacgcaattctttatcctgtgaactcatctgagtgggaggtggtggacactggggtttccttccctctctccgtagcatccgttggtctttctctccatctctgttggtttgtctgtctctgtcttcctcccaatccctaggggaagggggcatttggctagggggtgcccctgtgagcctcgaccttgccccctcgtccctctccccagtgtttccaggacccccaataaaccttgtcctgtcagtcgctgaaaaaaaaaaaaaaaaaaaa

SEQ ID NO: 380 - DNA, 2834 bp, HOMO SAPIENS
gagctacgagcgcggagcttgcgcagaagacccccatcagggtgcggggtgcagttgcggctccagggccatggcggaggagcagggccgggaacgggactcggttcccaagccgtcggtgctgttcctccacccagacctgggcgtgggcggcgctgagcggctggtgttggacgcggcgctggcgctgcaggcgcgcgggtgtagcgtgaagatctggacagcgcactacgacccgggccactgtttcgccgagagccgcgagctaccggtgcgctgtgccggggactggctgccgcgaggcctgggctggggcggccgcggcgccgccgtctgcgcctacgtgcgcatggttttcctggcgctctacgtgctgttcctcgccgacgaggagttcgacgtggtagtgtgcgaccaggtgtctgcctgtatcccagtgttcaggctggctagacggcggaagaagatcctattttactgtcacttcccagatctgcttctcaccaagagagattcttttcttaaacgactatacagggccccaattgactggatagaggaatacaccacaggcatggcagactgcatcttagtcaacagccagttcacagctgctgtttttaaggaaacattcaagtccctgtctcacatagaccctgatgtcctctatccatctctaaatgtcaccagctttgactcagttgttcctgaaaagctggatgacctagtccccaaggggaaaaaattcctgctgctctccatcaacagatacgaaaggaagaaaaatctgactttggcactggaagccctagtacagctgcgtggaagattgacatcccaagattgggagagggttcatctgatcgtggcaggtggttatgacgagagagtcctggagaatgtggaacattatcaggaattgaagaaaatggtccaacagtccgaccttggccagtatgtgaccttcttgaggtctttctcagacaaacagaaaatctccctcctccacagctgcacgtgtgtgctttacacaccaagcaatgagcactttggcattgtccctctggaagccatgtacatgcagtgcccagtcattgctgttaattcgggtggacccttggagtccattgaccacagtgtcacagggtttctgtgtgagcctgacccggtgcacttctcagaagcaatagaaaagttcatccgtgaaccttccttaaaagccaccatgggcctggctggaagagccagagtgaaggaaaaattttcccctgaagcatttacagaacagctctaccgatatgttaccaaactgctggtataatcagattgtttttaagatctccattaatgtcatttttatggattgtagacccagttttgaaaccaaaaaagaaacctagaatctaatgcagaagagatcttttaaaaaataaacttgagtcttgaatgtgagccactttcctatataccacacctccctgtccacttttcagaaaaaccatgtcttttatgctataatcattccaaattttgccagtgttaagttacaaatgtggtgtcattccatgttcagcagagtattttaattatattttctcgggattattgctcttctgtctataaattttgaatgatactgtgccttaattggttttcatagtttaagtgtgtatcattatcaaagttgattaatttggcttcatagtataatgagagcagggctattgtagttcccagattcaatccaccgaagtgttcactgtcatctgttagggaatttttgtttgtcctgtctttgcctggatccatagcgagagtgctctgtattttttttaagataatttgtatttttgcacactgagatataataaaaggtgtttatcataaaaaagaaacagtattagattttggtctccataatctattttggtattgttacgaacatggatatgacaaccaaactggaaatcagaacactagggtaaagtggatattgaaatgaagcaagaatattgtcacacatgtgttgtgcatcttgtttagggtatatttcttaatgtcatctaggtcattagttttgttaatatttgtgttgtcttgaccaagctcctactaagtataggacacaaatgttttttatcttccaaggcctggctcaaatgccactgctgcaaagctttctttgaccctctggccacctcccaagccagaagttatcttccccctccatgtactctagccttttcatgacactgatattttcgtgacactgacttatagttcactgtttacctgttggtctaacagcaaatcataaacagtagttttcaacatacttctaaggctaaattcatttccagaagtagcaaagcttactagccaaaggctccacatttatcaactcttaagagctagacttgagagcctaacagcctatatgattttgtgtaaattgatctctatacctcagcttcttcatctgcaaagtgagataattgtactattctactttcctcatagtgcggttataacagattatgataatattacaaagtacttaatacttggcatatagtatatatattagctattagtattttgcaatttggggatattgaaaattagaaattgcatgttagttcatgctgcactaccatattgttcttttggggctcttcaatgggtgaaattccattttacagtttatcatgtgcatctgtatcacaggagtattttggcaaaatgattctgtaccaaaaaggagtactataaaatgagggtgccaaatatattgagtcttttatgggattaaaagttctgttgcattccaaaaa

SEQ ID NO: 381 - DNA, 818 bp, HOMO SAPIENS
cgcagcgggtcctctctatctagctccagcctctcgcctgcgccccactccccgcgtcccgcgtcctagccgaccatggccgggcccctgcgcgccccgctgctcctgctggccatcctggccgtggccctggccgtgagccccgcggccggctccagtcccggcaagccgccgcgcctggtgggaggccccatggacgccagcgtggaggaggagggtgtgcggcgtgcactggactttgccgtcggcgagtacaacaaagccagcaacgacatgtaccacagccgcgcgctgcaggtggtgcgcgcccgcaagcagatcgtagctggggtgaactacttcttggacgtggagctgggccgaaccacgtgtaccaagacccagcccaacttggacaactgccccttccatgaccagccacatctgaaaaggaaagcattctgctctttccagatctacgctgtgccttggcagggcacaatgaccttgtcgaaatccacctgtcaggacgcctaggggtctgtaccgggctggcctgtgcctatcacctcttatgcacacctcccaccccctgtattcccacccctggactggtggcccctgccttggggaaggtctccccatgtgcctgcaccaggagacagacagagaaggcagcaggcggcctttgttgctcagcaaggggctctgccctccctccttccttcttgcttctcatagccccggtgtgcggtgcatacacccccacctcctgcaataaaatagtagcatcggcaaaaaaaaaaaaaaaaaaaaaaaaaaaaaaaaaaaaaaaaaaa

SEQ ID NO: 382 - DNA, 4435 bp, HOMO SAPIENS
ggcgaggcgcctgttgattggccactggggcccgggttcctccggcggagcgcgcctccccccagatttcccgccagcaggagccgcgcggtagatgcggtgcttttaggagctccgtccgacagaacggttgggccttgccggctgtcggtatgtcgcgacagagcaccctgtacagcttcttccccaagtctccggcgctgagtgatgccaacaaggcctcggccagggcctcacgcgaaggcggccgtgccgccgctgcccccggggcctctccttccccaggcggggatgcggcctggagcgaggctgggcctgggcccaggcccttggcgcgctccgcgtcaccgcccaaggcgaagaacctcaacggagggctgcggagatcggtagcgcctgctgcccccaccagttgtgacttctcaccaggagatttggtttgggccaagatggagggttacccctggtggccttgtctggtttacaaccacccctttgatggaacattcatccgcgagaaagggaaatcagtccgtgttcatgtacagttttttgatgacagcccaacaaggggctgggttagcaaaaggcttttaaagccatatacaggttcaaaatcaaaggaagcccagaagggaggtcatttttacagtgcaaagcctgaaatactgagagcaatgcaacgtgcagatgaagccttaaataaagacaagattaagaggcttgaattggcagtttgtgatgagccctcagagccagaagaggaagaagagatggaggtaggcacaacttacgtaacagataagagtgaagaagataatgaaattgagagtgaagaggaagtacagcctaagacacaaggatctaggcgaagtagccgccaaataaaaaaacgaagggtcatatcagattctgagagtgacattggtggctctgatgtggaatttaagccagacactaaggaggaaggaagcagtgatgaaataagcagtggagtgggggatagtgagagtgaaggcctgaacagccctgtcaaagttgctcgaaagcggaagagaatggtgactggaaatggctctcttaaaaggaaaagctctaggaaggaaacgccctcagccaccaaacaagcaactagcatttcatcagaaaccaagaatactttgagagctttctctgcccctcaaaattctgaatcccaagcccacgttagtggaggtggtgatgacagtagtcgccctactgtttggtatcatgaaactttagaatggcttaaggaggaaaagagaagagatgagcacaggaggaggcctgatcaccccgattttgatgcatctacactctatgtgcctgaggatttcctcaattcttgtactcctgggatgaggaagtggtggcagattaagtctcagaactttgatcttgtcatctgttacaaggtggggaaattttatgagctgtaccacatggatgctcttattggagtcagtgaactggggctggtattcatgaaaggcaactgggcccattctggctttcctgaaattgcatttggccgttattcagattccctggtgcagaagggctataaagtagcacgagtggaacagactgagactccagaaatgatggaggcacgatgtagaaagatggcacatatatccaagtatgatagagtggtgaggagggagatctgtaggatcattaccaagggtacacagacttacagtgtgctggaaggtgatccctctgagaactacagtaagtatcttcttagcctcaaagaaaaagaggaagattcttctggccatactcgtgcatatggtgtgtgctttgttgatacttcactgggaaagtttttcataggtcagttttcagatgatcgccattgttcgagatttaggactctagtggcacactatcccccagtacaagttttatttgaaaaaggaaatctctcaaaggaaactaaaacaattctaaagagttcattgtcctgttctcttcaggaaggtctgatacccggctcccagttttgggatgcatccaaaactttgagaactctccttgaggaagaatattttagggaaaagctaagtgatggcattggggtgatgttaccccaggtgcttaaaggtatgacttcagagtctgattccattgggttgacaccaggagagaaaagtgaattggccctctctgctctaggtggttgtgtcttctacctcaaaaaatgccttattgatcaggagcttttatcaatggctaattttgaagaatatattcccttggattctgacacagtcagcactacaagatctggtgctatcttcaccaaagcctatcaacgaatggtgctagatgcagtgacattaaacaacttggagatttttctgaatggaacaaatggttctactgaaggaaccctactagagagggttgatacttgccatactccttttggtaagcggctcctaaagcaatggctttgtgccccactctgtaaccattatgctattaatgatcgtctagatgccatagaagacctcatggttgtgcctgacaaaatctccgaagttgtagagcttctaaagaagcttccagatcttgagaggctactcagtaaaattcataatgttgggtctcccctgaagagtcagaaccacccagacagcagggctataatgtatgaagaaactacatacagcaagaagaagattattgattttctttctgctctggaaggattcaaagtaatgtgtaaaattatagggatcatggaagaagttgctgatggttttaagtctaaaatccttaagcaggtcatctctctgcagacaaaaaatcctgaaggtcgttttcctgatttgactgtagaattgaaccgatgggatacagcctttgaccatgaaaaggctcgaaagactggacttattactcccaaagcaggctttgactctgattatgaccaagctcttgctgacataagagaaaatgaacagagcctcctggaatacctagagaaacagcgcaacagaattggctgtaggaccatagtctattgggggattggtaggaaccgttaccagctggaaattcctgagaatttcaccactcgcaatttgccagaagaatacgagttgaaatctaccaagaagggctgtaaacgatactggaccaaaactattgaaaagaagttggctaatctcataaatgctgaagaacggagggatgtatcattgaaggactgcatgcggcgactgttctataactttgataaaaattacaaggactggcagtctgctgtagagtgtatcgcagtgttggatgttttactgtgcctggctaactatagtcgagggggtgatggtcctatgtgtcgcccagtaattctgttgccggaagataccccccccttcttagagcttaaaggatcacgccatccttgcattacgaagactttttttggagatgattttattcctaatgacattctaataggctgtgaggaagaggagcaggaaaatggcaaagcctattgtgtgcttgttactggaccaaatatggggggcaagtctacgcttatgagacaggctggcttattagctgtaatggcccagatgggttgttacgtccctgctgaagtgtgcaggctcacaccaattgatagagtgtttactagacttggtgcctcagacagaataatgtcaggtgaaagtacattttttgttgaattaagtgaaactgccagcatactcatgcatgcaacagcacattctctggtgcttgtggatgaattaggaagaggtactgcaacatttgatgggacggcaatagcaaatgcagttgttaaagaacttgctgagactataaaatgtcgtacattattttcaactcactaccattcattagtagaagattattctcaaaatgttgctgtgcgcctaggacatatggcatgcatggtagaaaatgaatgtgaagaccccagccaggagactattacgttcctctataaattcattaagggagcttgtcctaaaagctatggctttaatgcagcaaggcttgctaatctcccagaggaagttattcaaaagggacatagaaaagcaagagaatttgagaagatgaatcagtcactacgattatttcgggaagtttgcctggctagtgaaaggtcaactgtagatgctgaagctgtccataaattgctgactttgattaaggaattatagactgactacattggaagctttgagttgacttctgacaaaggtggtaaattcagacaacattatgatctaataaactttattttttaaaaatgaaaaaaaaaaaaaaaaaaaaaaaaaaaaaaaaaaaaaaaaaaaaaaaaaaaaaaaaaaaaaaaaaaaaaaaaaaaaaaaaaaaaaaaaaaaaaaaaaaaaaaaaaaaa

SEQ ID NO: 383 - DNA, 1538 bp, HOMO SAPIENS
ggacttccggcgggtgacgcgcccgggttcggctacaaaagaggacggctgcggcgcgccgggcggaactttccagaacgctcggtgagaggcggaggagcggtaactaccccggctgcgcacagctcggcgctccttcccgctccctcacacaccggcctcagcccgcaccggcagtagaagatggtgaaagaaacaacttactacgatgttttgggggtcaaacccaatgctactcaggaagaattgaaaaaggcttataggaaactggctttgaagtaccatcctgataagaacccaaatgaaggagagaagtttaaacagatttctcaagcttacgaagttctctctgatgcaaagaaaagggaattatatgacaaaggaggagaacaggcaattaaagagggtggagcaggtggcggttttggctcccccatggacatctttgatatgttttttggaggaggaggaaggatgcagagagaaaggagaggtaaaaatgttgtacatcagctctcagtaaccctagaagacttatataatggtgcaacaagaaaactggctctgcaaaagaatgtgatttgtgacaaatgtgaaggtagaggaggtaagaaaggagcagtagagtgctgtcccaattgccgaggtactggaatgcaaataagaattcatcagataggacctggaatggttcagcaaattcagtctgtgtgcatggagtgccagggccatggggagcggatcagtcctaaagatagatgtaaaagctgcaacggaaggaagatagttcgagagaagaaaattttagaagttcatattgacaaaggcatgaaagatggccagaagataacattccatggtgaaggagaccaagaaccaggactggagccaggcgatattatcattgtgttagatcagaaggaccatgctgtttttactcgacgaggagaagaccttttcatgtgtatggacatacagctcgttgaagcactgtgtggcttccagaagccaatatctactcttgacaaccgaaccatcgtcatcacctctcatccaggtcagattgtcaagcatggagatatcaagtgtgtactaaatgaaggcatgccaatttatcgtagaccatatgaaaagggtcgcctaatcatcgaatttaaggtaaactttcctgagaatggctttctctctcctgataaactgtctttgctggaaaaactcctacccgagaggaaggaagtggaagagactgatgagatggaccaagtagaactggtggactttgatccaaatcaggaaagacggcgccactacaatggagaagcatatgaggatgatgaacatcatcccagaggtggtgttcagtgtcagacctcttaatgggccagtgaataacactcactgctggcatttaatgtgcagtagtgaatgagtgaaggactgtaatcataatatgctcactacttgctcttgtttttgttttaataaactatagtagtgttttaaaaagttaaatgaagaataaacgcaaatataaaagc

SEQ ID NO: 384 - DNA, 1516 bp, HOMO SAPIENS
gagcacagactcccttttctttggcaagatggcggagtacgacttgactactcgcatcgcgcactttttggatcggcatctagtctttccgcttcttgaatttctctctgtaaaggagatatataatgaaaaggaattattacaaggtaaattggaccttcttagtgataccaacatggtagactttgctatggatgtatacaaaaacctttattctgatgatattcctcatgctttgagagagaaaagaaccacagtggttgcacaactgaaacagcttcaggcagaaacagaaccaattgtgaagatgtttgaagatccagaaactacaaggcaaatgcagtcaaccagggatggtaggatgctctttgactacctggcggacaagcatggttttaggcaggaatatttagatacactctacagatatgcaaaattccagtacgaatgtgggaattactcaggagcagcagaatatctttatttttttagagtgctggttccagcaacagatagaaatgctttaagttcactctggggaaagctggcctctgaaatcttaatgcagaattgggatgcagccatggaagaccttacacggttaaaagagaccatagataataattctgtgagttctccacttcagtctcttcagcagagaacatggctcattcactggtctctgtttgttttcttcaatcaccccaaaggtcgcgataatattattgacctcttcctttatcagccacaatatcttaatgcaattcagacaatgtgtccacacattcttcgctatttgactacagcagtcataacaaacaaggatgttcgaaaacgtcggcaggttctaaaagatctagttaaagttattcaacaggagtcttacacatataaagacccaattacagaatttgttgaatgtttatatgttaactttgactttgatggggctcagaaaaagctgagggaatgtgaatcagtgcttgtgaatgacttcttcttggtggcttgtcttgaggatttcattgaaaatgcccgtctcttcatatttgagactttctgtcgcatccaccagtgtatcagcattaacatgttggcagataaattgaacatgactccagaagaagctgaaaggtggattgtaaatttgattagaaatgcaagactggatgccaagattgattctaaattaggtcatgtggttatgggtaacaatgcagtctcaccctatcagcaagtgattgaaaagaccaaaagcctttcctttagaagccagatgttggccatgaatattgagaagaaacttaatcagaatagcaggtcagaggctcctaactgggcaactcaagattctggcttctactgaagaaccataaagaaaagatgaaaaaaaaaactatcaaagaaagatgaaataataaaactattatataaagggtgacttacattttggaaacaacatattacgtataaattttgaagaattggaataaaattgattcattttaaaaaaaaa

SEQ ID NO: 385 - DNA, 6019 bp, HOMO SAPIENS
gacctcccacaactggagcagccgggaacagctctgaccacagtggttccggggagaagcctttccaggacccatgtgtaggcacaactgttttccctgatcaggatacttgcggcactcaacagaggaaagaaattcctaagggaacactgctcagaaagtactgcagcatgtcttcaaatgcctgaggatcaagttggaaaactagaagcaacagaaaacacaataagcgcaatggcggcggccgcggcggagcagcaacagttctacctgctcctgggaaacctgctcagccccgacaatgtggtccggaaacaggcagaggaaacctatgagaatatcccaggccagtcaaagatcacattcctcttacaagccatcagaaatacaacagctgctgaagaggctagacaaatggccgccgttctcctaagacgtctcttgtcctctgcatttgatgaagtctatccagcacttccctctgatgttcagactgccatcaagagtgagctactcatgattattcagatggaaacacaatctagcatgaggaaaaaagtttgtgatattgcggcagaactggccaggaatttaatagatgaggatggcaataaccagtggcccgaaggtttgaagttcctttttgattcagtcagctctcaaaatgtgggactgcgggaagctgcccttcacattttctggaactttcctggaatttttgggaaccagcaacaacactatttagatgtcatcaaacgaatgttagttcagtgtatgcaagatcaggaacacccgtcgatcaggacgttatctgctagagctacagctgcatttatacttgcaaatgagcataatgttgctctgttcaaacattttgcagacttgctaccgggattcctacaggcggtaaatgactcgtgctaccagaatgatgattctgtcctaaaatccctcgttgagattgcagatactgttccaaagtatttgcgtcctcacttggaagcaactctacagctaagtctaaagttgtgtggagacactagcctcaacaatatgcaacgccagcttgcccttgaagtgatcgtcaccctctctgagactgcagctgctatgttaagaaaacataccaatattgttgcacagactattcctcagatgttagcaatgatggttgatttggaagaagatgaggactgggcaaatgcagatgaactagaagatgatgattttgacagcaatgcagttgcaggcgagagtgctctagatcgaatggcttgcggacttggtggaaagctcgttctgccgatgatcaaggaacacattatgcaaatgcttcaaaatcctgactggaaataccggcatgcaggattgatggccttatctgccattggtgaagggtgccaccagcaaatggaaggaattctaaatgagatcgtaaattttgttttactttttctccaggatcctcatccaagagtaaggtatgcagcctgtaatgccgtgggacagatggctacagattttgcacctggtttccaaaagaaatttcatgagaaggtgattgcagctctgctgcagaccatggaagaccaaggcaatcaacgtgtgcaggcccatgcagctgctgccctcattaactttactgaagactgtcccaagtcactacttattccatacttggataatttggtgaaacatctgcattccattatggtactgaagcttcaagagctgattcagaaaggcaccaagttagttttggaacaagttgtgacatccattgcatcagttgccgatactgcagaagaaaaatttgtcccctactatgatttatttatgccatcactgaagcacatcgttgagaatgcggttcaaaaagaactgagacttctgagaggaaaaactattgaatgcattagcctcattggtctggctgttgggaaggaaaaattcatgcaggatgcatcagatgtgatgcagcttttgttaaagacccagacagacttcaatgatatggaagatgatgatcctcagatctcttacatgatctcagcatgggccagaatgtgcaaaatccttggaaaagaatttcagcaataccttccagtggttatggggcctttaatgaagacggcttcaattaagcccgaagtagcccttttagatacccaagacatggagaatatgagtgatgatgatggttgggaatttgtgaaccttggagatcagcaaagctttggtattaaaactgcaggactagaagaaaaatcaactgcttgccagatgttggtttgctatgctaaggagttaaaggaaggctttgtggagtacaccgaacaggttgtcaaactgatggtccctttactgaaattttatttccacgatggtgttcgagtggcagcagcggaatccatgcctcttctcctggagtgtgcaagagtccgtggtcctgagtatctcacacagatgtggcattttatgtgtgatgctctaattaaggccattggtacagaaccagattcagacgtcctctcagaaataatgcattcttttgcaaagtgcattgaagtaatgggagatggatgccttaataatgaacactttgaagaactgggaggtatattgaaagcaaagcttgaagaacattttaaaaatcaagaattacgacaagttaaaagacaagatgaagactatgatgaacaggtcgaagagtcactacaagatgaggatgataatgatgtttatattctgaccaaagtgtcagatattttacactcaatattcagtagctacaaagaaaaggtgttaccatggtttgaacagctgcttccattaattgtcaacctcatttgtccacatagaccatggccagacagacaatggggattatgcatctttgatgatgtcatagaacactgtagtccagcctcatttaaatacgcagaatatttcttaagaccaatgctccaatatgtatgtgacaacagcccagaagtcaggcaagcagctgcatatggcctgggagtcatggcacagtacggtggagataattatcgccctttttgtacagaagcacttcccctgctggtaagagttattcagtctgcggattctaagaccaaagaaaatgtcaatgctacagagaactgcatctcagcagtagggaaaatcatgaagttcaagcctgactgtgtaaacgttgaagaggtccttccacactggttgtcttggcttccactacatgaagataaagaagaagctgttcagactttcaattatctgtgtgacctgattgaaagtaatcatccaattgttcttggcccaaacaataccaatctgcccaaaatatttagtataattgcggaaggagaaatgcacgaggcaattaaacatgaagatccttgtgccaaacgtctggccaatgtcgttcgccaagtacagacttctggaggactgtggactgagtgcatagcacagctcagtcctgagcagcaggccgccattcaggagctcctgaactctgcgtgaagggccttaatgtcacccaccagaaaactaactccaaataaacgcttaccctttcctttaggtttctttgttttgtttttgagcaaaagagatcggtagtgttgtgtgtaggccattcttctggagagccacaagcaggaagagcagcgctgtgttgcagaatggagtttccatggatttctaccagaccactgaaggagttcctggaagccctgcggtagctagcactgaagactatttttctattggtataacccgcccacctgaaggggaaagggaaatcaaattaatttttctcgttagacataaggaaatttaaggaaaaacagctttaagaacagttactcagcgtagatgtgtgttcacacaaattgctctgcattcagtgttcattgtgaattgggagtgtgagtctttctgtagggtagaaagaagcctcctacccagcaaaccagtagacccaaaagttgaaaaaaactgatgacagacaacaagcatgaagatggcatatttgatgtcactttggttctttttcccagaaggcttatacagtgactcagtcgggaagctttccagcttccagcccttgaatgtgaagtgtcattggcatgtctggcagtagtctctcattcactcctcaataaacaacattgaatacaaaagaggcttgtgtaaaaactcagtactgtctggcttggattcatttcatgtttttaatataagaatgatctaatatttttttaaagtaatagctatcagtaatagctgagtgttttttcccctaatattttccttgtgcaattcagacttaagcatcgagtttttaccatcttccactttaagctaagttatgatacctattccattcacaattggtgttctttttaaggtttgcaaatttcagccaattttgtagctaagattgttctgatcagctcaaaaagatttggcttagtgttttcattgcaaattataattgctgtagagccacacacaacttttgaacttttaattataagtgttatggctaaagttatttactgaaaatttcagtaaaatgtgtgaatgtttctttatgtattaacctcatagcagtaaatgacttgctgttgtttaatttttctaaggcatcttaatagacttctgttgaaaacttcagtgttaacatttttatagtttgtactaaatttaaccgtgatataaaaatgaattttatgcatagatcagaattttaaattaaaggttttttctttaaatgatttgtattactttattaaaactaaatctgaaatggaatagaaaatagaatggattacatacagatggtttccttgttagcagatgcccttcaaatatattttacgtttgcagcacaacaccattgcccggaggcttccgaatctagcaaagcagcatattaaatgactccacctgcgcagtccttgtgttcagtggatgaatacctgtgggctcttgtaatgtgtggtaatatttggagctttatagcctgtattccttgggagaaaaaaatgggaattggagtaaaaagtgtgtcaagacaacccctttctgctttcttatgtagcatctgcaaagccgattcatgtactgatgccaatcagctagagcaatgtaggctttttttaatttaaattattactacactttattactacacttgcagaaaagaaacatgttaaaatcatggcacacctgcagaatttcagatgacagtgtggtcagaagatgttttttgggagaacctagtgtttgctgggcactatgctaagcactttgggagcaagaacctcctaccttccagtttaaacactagtggtattgtcagatgccgttagtatctgagatgtacttacagcagggttctaagagctctgaaagaagcgctctgttagatgcagactggcagcatcctccttgataaaagcagaaaagcaaagaggtaattggagttgaatcaagttaatagggaaggttggtagtaaatgctgttagtgtgacatgattctgaaacccagagctcagaactaactgtgagatgtaccatgaactaacaattctttgaaaggacctgcagaagcatttttaatacctcattctgtctatgcaagatgaaaatccatggagttttttcttggcttttgtaccaaatttaggggtcttgcatgtcagcaagtgatatatattgtttataaatgcaagctatttctggaggggaaaaatgtgtgtggctcttacgttttctgggaattttgtaacaagttacacgcacaagtgttagaaactttggcataactcaatttggagtattttttaaatgctgtatctttaaagaaaagtaaaattgtcttaaatctaattgacacttctgtaatgagaggcaaccttataactctggagttgtagtttgacagaaccatcagtaaagacataagcaaataaatggtcttggtgcaaaaaaaaaaaaaaaaaa

SEQ ID NO: 386 - DNA, 3115 bp, HOMO SAPIENS
agacgcagtcttcagcaaggaagtgctgggaacgccctggagtgaacccaggaagatgcctgcagtgggtgccagggcccctctccaccgtccctgctgggcttcggggccacgcccgactgctgtgaacggcctgcggagcaccacgtgcgacggctggaggcgagaggtctgcctttgatgtggctgttggtgcagggcctgtggtgccttccgcagcggaaatggcgcgccgcccggggagggcgggagcagcgtcccgggtgcccctgtgaggatgagcgacgagatgactggagggtccctgaagacctcactagggtgcccccagccggtccgctcccaggaagcgacacccccacagccccagggctgcagctgagggggtcgccactctggctgggcgaggctgggcccttgggggcaggcgccagagtggcctcaggctctacaagatgcctgaaaacaccaacctctccagggctcactagcattggacgctttcacgctctgccctggccggaagccccctcaccccgcgcgatgtgcaaactcctgcagggctcactcagtttccagaactttaattattggaaagttctccctggtccagcccccaaatctgccgtgaacgttgacagctgagttgctgctccatgcgtgctttggctgagagcagaggggacccctgtcctccctgagctgctgacgaggggaggggtgaagggtggggcctctggagagggcaggtcccggggaagctccggactcctagaggggcggccaggtgggggccctggtgaccaggacagactgtggtgttttttaacgtaaaggagatccgcggtgtgagggaccccctgggtcctgcacgccgcctggtggcaggccgggccatggtgggtgctcacgcccccggcatgtggccgccctcagtgggaggggctctgagaacgactttttaaaacgcagagaaaagctccattcttcccaggacctcagcgcagccctggcccaggaaggcaggagacagaggccaggacggtccagaggtgtcgaaatgtcctggggacctgagcagcagccaccagggaagaggcagggagggagctgaggaccaggcttggttgtgagaatccctgagcccaggcggtagatgccaggaggtgtctggactggctgggccatgcctgggctgacctgtccagccagggagagggtgtgagggcagatctgggggtgcccagatggaaggaggcaggcatgggggacacccaaggccccctggcagcaccatgaactaagcaggacacctggaggggaagaactgtggggacctggaggcctccaacgactccttcctgcttcctggacaggactatggctgtgcagggatcccagagaagacttctgggctccctcaactccacccccacagccatcccccagctggggctggctgccaaccagacaggagcccggtgcctggaggtgtccatctctgacgggctcttcctcagcctggggctggtgagcttggtggagaacgcgctggtggtggccaccatcgccaagaaccggaacctgcactcacccatgtactgcttcatctgctgcctggccttgtcggacctgctggtgagcgggagcaacgtgctggagacggccgtcatcctcctgctggaggccggtgcactggtggcccgggctgcggtgctgcagcagctggacaatgtcattgacgtgatcacctgcagctccatgctgtccagcctctgcttcctgggcgccatcgccgtggaccgctacatctccatcttctacgcactgcgctaccacagcatcgtgaccctgccgcgggcgcggcgagccgttgcggccatctgggtggccagtgtcgtcttcagcacgctcttcatcgcctactacgaccacgtggccgtcctgctgtgcctcgtggtcttcttcctggctatgctggtgctcatggccgtgctgtacgtccacatgctggcccgggcctgccagcacgcccagggcatcgcccggctccacaagaggcagcgcccggtccaccagggctttggccttaaaggcgctgtcaccctcaccatcctgctgggcattttcttcctctgctggggccccttcttcctgcatctcacactcatcgtcctctgccccgagcaccccacgtgcggctgcatcttcaagaacttcaacctctttctcgccctcatcatctgcaatgccatcatcgaccccctcatctacgccttccacagccaggagctccgcaggacgctcaaggaggtgctgacatgctcctggtgagcgcggtgcacgcggctttaagtgtgctgggcagagggaggtggtgatattgtgtggtctggttcctgtgtgaccctgggcagttccttacctccctggtccccgtttgtcaaagaggatggactaaatgatctctgaaagtgttgaagcgcggacccttctgggtccagggaggggtccctgcaaaactccaggcaggacttctcaccagcagtcgtggggaacggaggaggacatggggaggttgtggggcctcaggctccgggcaccaggggccaacctcaggctcctaaagagacattttccgcccactcctgggacactccgtctgctccaatgactgagcagcatccaccccaccccatctttgctgccagctctcaggaccgtgccctcgtcagctgggatgtgaagtctctgggtggaagtgtgtgccaagagctactcccacagcagccccaggagaaggggctttgtgaccagaaagcttcatccacagccttgcagcggctcctgcaaaaggaggtgaaatccctgcctcaggccaagggaccaggtttgcaggagcccccctagtggtatggggctgagccctcctgagggccggttctaaggctcagactgggcactggggcctcagcctgctttcctgcagcagtcgcccaagcagacagccctggcaaatgcctgactcagtgaccagtgcctgtgagcatggggccaggaaagtctggtaataaatgtgactcagcatcacccaccttaaaaaaaaaaaaaaaaa

SEQ ID NO: 387 - DNA, 1161 bp, HOMO SAPIENS
acccgggaaaccggaagccgcctcccacttggttgctcgtacgcggctagtgggtcctcagtggatgtaggctgggcgccgcgatgttcgacgggacaccggcggagagcgacctcggggttaaggggtggggctgacgtcaggagccaagatggcggcggtggtcgccctctccttgaggcgccggttgccggccacaacccttggcggagcctgcctgcaggcctcccgaggagcccagacagctgcagccacagctccccgtatcaagaaatttgccatctatcgatgggacccagacaaggctggagacaaacctcatatgcagacttatgaagttgaccttaataaatgtggccccatggtattggatgctttaatcaagattaagaatgaagttgactctactttgaccttccgaagatcatgcagagaaggcatctgtggctcttgtgcaatgaacatcaatggaggcaacactctagcttgcacccgaaggattgacaccaacctcaataaggtctcaaaaatctaccctcttccacacatgtatgtgataaaggatcttgttcccgatttgagcaacttctatgcacagtacaaatccattgagccttatttgaagaagaaggatgaatctcaggaaggcaagcagcagtatctgcagtccatagaagagcgtgagaaactggacgggctctacgagtgcattctctgtgcctgctgtagcaccagctgccccagctactggtggaacggagacaaatatctggggcctgcagttcttatgcaggcctatcgctggatgattgactccagagatgacttcacagaggagcgcctggccaagctgcaggacccattctctctataccgctgccacaccatcatgaactgcacaaggacctgtcctaagggtctgaatccagggaaagctattgcagagatcaagaaaatgatggcaacctataaggagaagaaagcttcagtttaactgtttccatgctaaacatgatttataaccagctcagagctgaacataatttatatctaatttgagttcctttaaagatcttggttttccatgaatacagcatgtataataaaaattttaagaaataaatgttattctactttattaacaaaaaaaaaaaaaaaaaa

SEQ ID NO: 388 - DNA, 5780 bp, HOMO SAPIENS
ctgggcggggccgggaagcggcagtggcggctacgcgcgcgggggtgcgcgcgggaacgaccgggaaacaccgcgagggccggggtgggccaggctgtggggacgacgggctgcgacgatggccgcagcggcgggcggcggcgggccggggacagcggtaggcgccacgggctcggggattgcggcggcagccgcaggcctagctgtttatcgacggaaggatgggggcccggccaccaagttttgggagagcccggagacggtgtcccagctggattcggtgcgggtctggctgggcaagcactacaagaagtatgttcatgcggatgctcctaccaataaaacactggctgggctggtggtgcagcttcttcagttccaggaagatgcctttgggaagcatgtcaccaacccggccttcaccaaactccctgcaaagtgtttcatggatttcaaagctggaggcgccttatgtcacattcttggggctgcttacaagtataaaaatgaacagggatggcggaggtttgacctacagaacccatctcgaatggatcgtaatgtggaaatgtttatgaacattgaaaaaacattggtgcagaacaattgtttgaccagacccaacatctacctcattccagacattgatctgaagttggctaacaaattgaaagatatcatcaaacgacatcagggaacatttacggatgagaagtcaaaagcttcccaccacatttacccatattcttcctcacaagacgatgaagaatggttgagaccggtgatgagaaaagagaagcaagtgttagtgcattggggcttttacccagacagctatgatacttgggtccatagtaatgatgttgatgctgaaattgaagatccaccaattccagaaaaaccatggaaggttcatgtgaaatggattttggacactgatattttcaatgaatggatgaatgaggaggattatgaggtggatgaaaataggaagcctgtgagttttcgtcagcggatttcaaccaagaatgaagagccagtcagaagtccagaaagaagagatagaaaagcatcagctaatgctcgaaagaggaaacattcgccttcgcctccccctccgacaccaacagaatcacggaagaagagtgggaagaaaggccaagctagcctttatgggaagcgcagaagtcagaaagaggaagatgagcaagaagatctaaccaaggatatggaagacccaacacctgtacccaatatagaagaagtagtacttcccaaaaatgtgaacctaaagaaagatagtgaaaatacacctgttaaaggaggaactgtagcggatctagatgagcaggatgaagaaacagtcacagcaggaggaaaggaagatgaagatcctgccaaaggtgatcagagtcgatcagttgaccttggggaagataatgtgacagagcagaccaatcacattattattcctagttatgcatcatggtttgattataactgtattcatgtgattgaacggcgtgctcttcctgagttcttcaatggaaaaaacaaatccaagactccagaaatatacttggcatatcgaaattttatgattgacacgtatcgtctaaacccccaagagtatttaactagcactgcttgtcggaggaacttgactggagatgtgtgtgctgtgatgagggtccatgcctttttagagcagtggggactcgttaattaccaagttgacccggaaagtagacccatggcaatgggacctcctcctactcctcattttaatgtattagctgataccccctctgggcttgtgcctctgcatcttcgatcacctcaggttcctgctgctcaacagatgctaaattttcctgagaaaaacaaggaaaaaccagttgatttgcagaactttggtctccgtactgacatttactccaagaaaacattagcaaagagtaaaggtgctagtgctggaagagaatggactgaacaggagacccttctactcctggaggccctggagatgtacaaggatgattggaacaaagtgtcggaacatgttggaagtcgtactcaggatgaatgcatcctccactttttgagacttcccattgaggacccataccttgagaattcagatgcttcccttgggcctttggcctaccagcctgtccccttcagtcagtcaggaaatccagttatgagtactgttgcttttttggcatctgtggtggaccctcgcgtggcatctgctgcagcaaaagcggctttggaggagttttctcgggtccgggaggaggtaccactggaattggttgaagctcatgtcaagaaagtacaagaagcagcacgagcctctgggaaagtggatcccacctacggtctggagagcagctgcattgcaggcacagggcccgatgagccagagaagcttgaaggagctgaagaggaaaaaatggaagccgaccctgatggtcagcagcctgaaaaggcagaaaataaagtggaaaatgaaacggatgaaggtgataaagcacaagatggagaaaatgaaaaaaatagtgaaaaggaacaggatagtgaagtgagtgaggataccaaatcagaagaaaaggagactgaagagaacaaagaactcactgatacatgtaaagaaagagaaagtgatactgggaagaagaaagtagaacatgaaatttccgaaggaaatgttgccacagccgcagcagctgctcttgcctcagcggctaccaaagccaagcacctggctgcagtggaagaaagaaagatcaagtccctggtagctctcttggttgagacacaaatgaagaaactagagatcaaacttcgacattttgaagagctggaaactatcatggacagagagaaagaagctctagaacaacagaggcagcagttgcttactgaacgccaaaacttccacatggaacagctgaagtatgctgaattacgagcacgacagcaaatggaacagcagcagcatggccagaaccctcaacaggcacaccagcactcaggaggacctggcctggccccacttggagcagcagggcaccctggcatgatgcctcatcaacagccccctccctaccctctgatgcaccaccagatgccaccacctcatccaccccagccaggtcagataccaggcccaggttccatgatgcccgggcagcacatgccaggccgcatgattcccactgttgcagccaacatccacccctctgggagtggccctacccctcctggcatgccaccaatgccaggaaacatcttaggaccccgggtacccctgacagcacctaacggcatgtatccccctccaccacagcagcagccaccgccaccaccacctgcagatggggtccctccgcctcctgctcctggcccgccagcctcagctgctccttagcctggaagatgcagggaacctccacgcccaccaccatgagctggagtggggatgacaagacttgtgttcctcaactttcttgggtttctttcaggatttttcttctcacagctccaagcacgtgtcccgtgcctccccactcctcttaccacccctctctctgacactttttgtgttgggtcctcagccaacactcaaggggaaacctgtagtgacagtgtgccctggtcatccttaaaataacctgcatctcccctgtcctggtgtgggagtaagctgacagtttctctgcaggtcctgtcaactttagcatgctatgtctttaccatttttgctctcttgcagttttttgctttgtcttatgcttctatggataatgctatataatcattatctttttatctttctgttattattgttttaaaggagagcatcctaagttaataggaaccaaaaaataatgatgggcagaagggggggaatagccacaggggacaaaccttaaggcattataagtgaccttatttctgcttttctgagctaagaatggtgctgatggtaaagtttgagacttttgccacacacaaatttgtgaaaattaaacgagatgtggaaggagaacctcagtgattttattccctagtgaggcctctgagggcctccacactgcctggcagaacataccactgaactagtatgtgctagaggagggcacaaacatccgctccttccctaggcctgctggctctggttttctatgcagatgattcattggattgggggtgagtgttttgtttttctgggggcagtgtgagctttgagggttggaatattgggaggcattccttagtttcctcaactagcctggaaagttaggagtctagggtaattacccccaatgagtctagcctactattcactgctttgtgtgcatttttttctccctctttaaaaaaccctttaaaagaaaaaaaaaagtagatagtgctaaatattttagctcatgaaacttggttaggatggctgggggtacaagtccccaaactacctcttgttacagtagccagggagtggaatttcgtcaaccggtacttttaaggttaggatgggacgggaaaagtgaagcaggatattagctccttataccttctcccttccatttctgagatctcacattccatctatcacagggttttcaaagagatgctgagggtaacaaggaactcacttggcagtcagagcatcatgctttgaggtttggggtgctcaggctgggagggtagaatgccattccagaggacaagccacaaaaatgccttaatttgagctcgtatttacccctgctgataagtgacttgagagttcccggttttttcctcttgtccttccctcccttctgtccttccatgtgtggggaaagggtgtttttggtagagcttggtttccaaagcgcctggctttctcacttcacattctcaagtggcagtttcattatttagaatgcaaggtggacatcttttggatatctttttctatatattttctaaagctttacatatgagagggtatagggaggtgtttataaaacacttgagaacttttttccttaatatcagaaagcaaaaaaataaaaccacaattgagatttgcctttcaaaccctcaggtttgcctctaaccaggtgtccctggtcaccatcagagtactggaatacgggaaccgaggagaccttggtccttttgtttttgttctggactcttgggagtggaaatgagaatgagtttattcctactggagcttagttccaatgcatttggctccagaaagaccccagtgccttttgacaatggccagggttttacctacttcctgccagtctttcccaaaggaaactcattccaaatacttcttttttcccctggagtccgagaaggaaaatggaattctggttcatactgtggtcccttgtaacctcaggtctttaatgtgatcactttcaaatttaaaagatccaggtggaaatatttttactatagtaataattctacaaaatacctgaattcttaacactgttatatttcagtataagtggtggctttttcttttcatgtctttgatctggttttattcctgtaattcagccacctgattttgtgaggggggggaataatatgtggtttttgtacaaacatgtttctcagtgtgttgttattttggaaaaaatgaggggagggagtttggcaagaatggagaaaatgaatgaagaaggcctaatctctctctttttcagtgaataaatggaacaccatttctggattctaaaaaaaaaaaaaaaaaaaaaaaa

SEQ ID NO: 389 - DNA, 10924 bp, HOMO SAPIENS
ccggcccagcggctctcctggcctcgcgctgcacattctctcctggcggcggcgccacctgcagtagcgttcgcccgaacatggcgacacggagcagcaggagggagtcgcgactcccgttcctattcaccctggtcgcactgctgccgcccggagctctctgcgaagtctggacgcagaggctgcacggcggcagcgcgcccttgccccaggaccggggcttcctcgtggtgcagggcgacccgcgcgagctgcggctgtgggcgcgcggggatgccaggggggcgagccgcgcggacgagaagccgctccggaggaaacggagcgctgccctgcagcccgagcccatcaaggtgtacggacaggttagtctgaatgattcccacaatcagatggtggtgcactgggctggagagaaaagcaacgtgatcgtggccttggcccgagatagcctggcattggcgaggcccaagagcagtgatgtgtacgtgtcttacgactatggaaaatcattcaagaaaatttcagacaagttaaactttggcttgggaaataggagtgaagctgttatcgcccagttctaccacagccctgcggacaacaagcggtacatctttgcagacgcttatgcccagtacctctggatcacgtttgacttctgcaacactcttcaaggcttttccatcccatttcgggcagctgatctcctcctacacagtaaggcctccaaccttctcttgggctttgacaggtcccaccccaacaagcagctgtggaagtcagatgactttggccagacctggatcatgattcaggaacatgtcaagtccttttcttggggaattgatccctatgacaaaccaaataccatctacattgaacgacatgaaccctctggctactccactgtcttccgaagtacagatttcttccagtcccgggaaaaccaggaagtgatccttgaggaagtgagagattttcagcttcgggacaagtacatgtttgctacaaaggtggtgcatctcttgggcagtgaacagcagtcttctgtccagctctgggtctcctttggccggaagcccatgagagcagcccagtttgtcacaagacatcctattaatgaatattacatcgcagatgcctccgaggaccaggtgtttgtgtgtgtcagccacagtaacaaccgcaccaatttatacatctcagaggcagaggggctgaagttctccctgtccttggagaacgtgctctattacagcccaggaggggccggcagtgacaccttggtgaggtattttgcaaatgaaccatttgctgacttccaccgagtggaaggattgcaaggagtctacattgctactctgattaatggttctatgaatgaggagaacatgagatcggtcatcacctttgacaaagggggaacctgggagtttcttcaggctccagccttcacgggatatggagagaaaatcaattgtgagctttcccagggctgttcccttcatctggctcagcgcctcagtcagctcctcaacctccagctccggagaatgcccatcctgtccaaggagtcggctccaggcctcatcatcgccactggctcagtgggaaagaacttggctagcaagacaaacgtgtacatctctagcagtgctggagccaggtggcgagaggcacttcctggacctcactactacacatggggagaccacggcggaatcatcacggccattgcccagggcatggaaaccaacgagctaaaatacagtaccaatgaaggggagacctggaaaacattcatcttctctgagaagccagtgtttgtgtatggcctcctcacagaacctggggagaagagcactgtcttcaccatctttggctcgaacaaagagaatgtccacagctggctgatcctccaggtcaatgccacggatgccttgggagttccctgcacagagaatgactacaagctgtggtcaccatctgatgagcgggggaatgagtgtttgctgggacacaagactgttttcaaacggcggaccccccatgccacatgcttcaatggagaggactttgacaggccggtggtcgtgtccaactgctcctgcacccgggaggactatgagtgtgacttcggtttcaagatgagtgaagatttgtcattagaggtttgtgttccagatccggaattttctggaaagtcatactcccctcctgtgccttgccctgtgggttctacttacaggagaacgagaggctaccggaagatttctggggacacttgtagcggaggagatgttgaagcgcgactggaaggagagctggtcccctgtcccctggcagaagagaacgagttcattctgtatgctgtgaggaaatccatctaccgctatgacctggcctcgggagccaccgagcagttgcctctcaccgggctacgggcagcagtggccctggactttgactatgagcacaactgtttgtattggtccgacctggccttggacgtcatccagcgcctctgtttgaatggaagcacagggcaagaggtgatcatcaattctggcctggagacagtagaagctttggcttttgaacccctcagccagctgctttactgggtagatgcaggcttcaaaaagattgaggtagctaatccagatggcgacttccgactcacaatcgtcaattcctctgtgcttgatcgtcccagggctctggtcctcgtgccccaagagggggtgatgttctggacagactggggagacctgaagcctgggatttatcggagcaatatggatggttctgctgcctatcacctggtgtctgaggatgtgaagtggcccaatggcatctctgtggacgaccagtggatttactggacggatgcctacctggagtgcatagagcggatcacgttcagtggccagcagcgctctgtcattctggacaacctcccgcacccctatgccattgctgtctttaagaatgaaatctactgggatgactggtcacagctcagcatattccgagcttccaaatacagtgggtcccagatggagattctggcaaaccagctcacggggctcatggacatgaagattttctacaaggggaagaacactggaagcaatgcctgtgtgcccaggccatgcagcctgctgtgcctgcccaaggccaacaacagtagaagctgcaggtgtccagaggatgtgtccagcagtgtgcttccatcaggggacctgatgtgtgactgccctcagggctatcagctcaagaacaatacctgtgtcaaagaagagaacacctgtcttcgcaaccagtatcgctgcagcaacgggaactgtatcaacagcatttggtggtgtgactttgacaacgactgtggagacatgagcgatgagagaaactgccctaccaccatctgtgacctggacacccagtttcgttgccaggagtctgggacttgtatcccactgtcctataaatgtgaccttgaggatgactgtggagacaacagtgatgaaagtcattgtgaaatgcaccagtgccggagtgacgagtacaactgcagttccggcatgtgcatccgctcctcctgggtatgtgacggggacaacgactgcagggactggtctgatgaagccaactgtaccgccatctatcacacctgtgaggcctccaacttccagtgccgaaacgggcactgcatcccccagcggtgggcgtgtgacggggatacggactgccaggatggttccgatgaggatccagtcaactgtgagaagaagtgcaatggattccgctgcccaaacggcacttgcatcccatccagcaaacattgtgatggtctgcgtgattgctctgatggctccgatgaacagcactgcgagcccctctgtacgcacttcatggactttgtgtgtaagaaccgccagcagtgcctgttccactccatggtctgtgacggaatcatccagtgccgcgacgggtccgatgaggatgcggcgtttgcaggatgctcccaagatcctgagttccacaaggtatgtgatgagttcggtttccagtgtcagaatggagtgtgcatcagtttgatttggaagtgcgacgggatggatgattgcggcgattattctgatgaagccaactgcgaaaaccccacagaagccccaaactgctcccgctacttccagtttcggtgtgagaatggccactgcatccccaacagatggaaatgtgacagggagaacgactgtggggactggtctgatgagaaggattgtggagattcacatattcttcccttctcgactcctgggccctccacgtgtctgcccaattactaccgctgcagcagtgggacctgcgtgatggacacctgggtgtgcgacgggtaccgagattgtgcagatggctctgacgaggaagcctgccccttgcttgcaaacgtcactgctgcctccactcccacccaacttgggcgatgtgaccgatttgagttcgaatgccaccaaccgaagacgtgtattcccaactggaagcgctgtgacggccaccaagattgccaggatggccgggacgaggccaattgccccacacacagcaccttgacttgcatgagcagggagttccagtgcgaggacggggaggcctgcattgtgctctcggagcgctgcgacggcttcctggactgctcggacgagagcgatgaaaaggcctgcagtgatgagttgactgtgtacaaagtacagaatcttcagtggacagctgacttctctggggatgtgactttgacctggatgaggcccaaaaaaatgccctctgcttcttgtgtatataatgtctactacagggtggttggagagagcatatggaagactctggagacccacagcaataagacaaacactgtattaaaagtcttgaaaccagataccacgtatcaggttaaagtacaggttcagtgtctcagcaaggcacacaacaccaatgactttgtgaccctgaggaccccagagggattgccagatgcccctcgaaatctccagctgtcactccccagggaagcagaaggtgtgattgtaggccactgggctcctcccatccacacccatggcctcatccgtgagtacattgtagaatacagcaggagtggttccaagatgtgggcctcccagagggctgctagtaactttacagaaatcaagaacttattggtcaacactctatacaccgtcagagtggctgcggtgactagtcgtggaataggaaactggagcgattctaaatccattaccaccataaaaggaaaagtgatcccaccaccagatatccacattgacagctatggtgaaaattatctaagcttcaccctgaccatggagagtgatatcaaggtgaatggctatgtggtgaaccttttctgggcatttgacacccacaagcaagagaggagaactttgaacttccgaggaagcatattgtcacacaaagttggcaatctgacagctcatacatcctatgagatttctgcctgggccaagactgacttgggggatagccctctggcatttgagcatgttatgaccagaggggttcgcccacctgcacctagcctcaaggccaaagccatcaaccagactgcagtggaatgtacctggaccggcccccggaatgtggtttatggtattttctatgccacgtcctttcttgacctctatcgcaacccgaagagcttgactacttcactccacaacaagacggtcattgtcagtaaggatgagcagtatttgtttctggtccgtgtagtggtaccctaccaggggccatcctctgactacgttgtagtgaagatgatcccggacagcaggcttccaccccgtcacctgcatgtggttcatacgggcaaaacctccgtggtcatcaagtgggaatcaccgtatgactctcctgaccaggacttgttgtatgcaattgcagtcaaagatctcataagaaagactgacaggagctacaaagtaaaatcccgtaacagcactgtggaatacacccttaacaagttggagcctggcgggaaataccacatcattgtccaactggggaacatgagcaaagattccagcataaaaattaccacagtttcattatcagcacctgatgccttaaaaatcataacagaaaatgatcatgttcttctgttttggaaaagcctggctttaaaggaaaagcattttaatgaaagcaggggctatgagatacacatgtttgatagtgccatgaatatcacagcttaccttgggaatactactgacaatttctttaaaatttccaacctgaagatgggtcataattacacgttcaccgtccaagcaagatgcctttttggcaaccagatctgtggggagcctgccatcctgctgtacgatgagctggggtctggtgcagatgcatctgcaacgcaggctgccagatctacggatgttgctgctgtggtggtgcccatcttattcctgatactgctgagcctgggggtggggtttgccatcctgtacacgaagcaccggaggctgcagagcagcttcaccgccttcgccaacagccactacagctccaggctggggtccgcaatcttctcctctggggatgacctgggggaagatgatgaagatgcccctatgataactggattttcagatgacgtccccatggtgatagcctgaaagagctttcctcactagaaaccaaatggtgtaaatattttatttgataaagatagttgatggtttattttaaaagatgcactttgagttgcaatatgttatttttatatgggccaaaaacaaaaaacaaaaaaaaaaaaaaggaaagaaaggaatgaataaactttgtagtaatcaactgtgaacttcaaaccaggttgattttagtaacccaattgctttgatttgacattaatgtagtcttacagggctgtgcttgctgggcatgcttttacgtctgtgagataatttcggttcagtaaattggccaatctttttatttttctaagacacagaaatgtatttaataaaaacctcgagagagtgatgggtggaaccccttctccttgaaagtgtgtacagatattccattttgtttggatatagtttataggaaagtgtgtggatgtattatggcggaaggtttctttatgttattttgttaatttattgggactctgtgtaaggccaggctttagtggtcattagacaccacatgtgttatgagccccttacccatagggttgggggtgggaagagaagcatatttttttgccattccggaagcaatccatttttattcacttgtgtgtcatgtaatggtctttggcaggagagagcactgagtcattgctggagttcagttcaacagagctgcagcttgggaagccctgtaagcccacagcttcctctcttatattaattgatggaattttactgtatgtgcctctgtacaagatgtagctttgagagctacaaaatgataacactgctttattacacactggtttcattgtcattgcaaaaacttaccctggttgtgggggagagttctagatctgtgccatgatccatacactggctaatagagtacataatttttccattttccattttttgtttttacttactactgaaggatctcagatgtaaaattatgtatttggtttgagatggccacttattgtccttaaaaatccatactgatatatgcagtcattttgaattggacagtgccttctctttttttttctcctcttcttccatctccctcacccatgcccccacccaatctaaagagacagtgctgtacattctcatagagatagagaagatctaaaaagttgagactactcaatccagttaacaacagcaggagcactagagtttgttcatttattctctctgtaaaacaagctgtgctttttttcttctgcctttaaaatgccacccgtgtattcaaaccatggccacttgatacttatgtagaatccatcgtgggctgatgcaagccctttatttaggcttagtgttgtgggcaccaatgtcgagcatcgttgtgacttgtgctgtatgattctcactgaagaatttcctttcagccaagaagcagtgaggtctgggaatattccaaagtcatgtctctgaatatgtgtccttgacgtgcaagctttgtaaaaccccatccccgcttaggtgcgaggcatcaccttctcacaagtgtttagtttcttttaaccacaagtatcattcttgggtgataatatagtttcattctacttagggattgtttagaaaacaaagaaagagccaattaaattttttagtttttgaaatttttatttatatgtatacttagatgagtattttaagctgtcgacctttagtttgccatacgggtaggactgtatttcatgttaacaactggtggtaatgataagccttcttctagcgtattttctcttctttcctgtcactttcctaagtttttttttttaaagactggaattttttttggctttatcttgtcttaccgtagagatttgttcaaaactctaagccctaccacctcccctttaataagctctttaaatagttgaatcattaacaacctggtgggaggcaagtcatttaattgaaccactaggaagtgtattttcttttctttttctgccaactttttggtggcatttgtaaaagctgatataaaaggctctgagatgttattttcagttattccataggcaagcctttttacagagcatatgtctccagttggcagcttgagatatttccgagcatccggttctagctaccagtgcctcccaatgcttagtgcacagtactgtagactggccatcacccctctccttggaaaatgccactgtgctgtttgaaaaaaagcagccttttagggctagagtattttatataaacagaagagctaagttcctgaagactaagctagatagctgcagctatatgtaaattgtatatttttatgaacttttgaagcacacactcctgtttccctctgtgtagctttgtggggatttcatgtatatatgctgtctgaaagaatccagaggttggagtgccaatagaaaatgaaaacaaatgccttgtactacaggcagcctctgaaggtgaccacataactgtcttcactgtgaccaatcggagtccctgcttgcttgtgaagaaggggcttttgtaccttgttggagatgccacctcagaagttcacactgtgcaggaaaaaggttttattctctcctggcatacattagaatgtcagatgcttgcatccatgtggaccacgatgggcctctaaaaattggtgggcagggggtttgcttatgagttttctctggaaaccgattttactcctggatgtattgaatgccccttgagctttatgagatacgagtccacatggataaaatgttagagagtggagttctacagaggattccaggaagaggccatgtctgtgcagtcctagttccagacaggtgagaagctccaggaactactggctaccttgacaagctgggtaaatagttatcattctgggtaactggttgaaactctgacttttggacaagtaattcctggggttctgtctttggtagcatcaccagggatatttgggtgggacagacagaagacacacagctgcctgttctctcctgcccatcatgtttggcccactagatgaagctgtactcagcaatttagggaatgtaacccttctcagaactggccattttcaggggaagcttgggagagcaatagtatggtgagccccttagagatgagcgcctactccttcttggcgaatgctgccttcagatgcttaccaagtggtcactgcatctagtaagattatatttccagtacacttccttagggcagaaacaccatcctatcaggtttggtcagtcccttcttcatgaagggagtcatggggaattcctgaaaattttcttccttctgcagacagttggatgagtcccttagagaaggcatccagagacataactaaactgaatatcatcccatattgattttaggaattgactctaaaactctgtgcagaatcttgtgttgggattgtatcttgacattcctgttgtgttatttttcttaactggagtgtgtgctgcctttcaggtacaatttttgtgtaataaaagccagtgcattaagtttatatagactactttctatgcaagactgagatatggaatagataggaagagatatgtactgctgggtacatggacagtaagtgtgttttcagatggagtaccagcaccgaaaatgggttgagggaggatgggttgtatgtatgtttctgcccactaattttgagcagccatattatgaattaaatcgtcacagccaagtaataacccaagaatggtatgagtttcatgtgtaatagctcaaatggaataagcatgaatgctggagtggaccattatcctcaaatattctatgtcacttctcatttaaagactcttgttatgaactattagaaactttaggcaaaatcaaaagtatttgcggcaaaataaaggcctattctactcttatttaaagtgaaacactgtatacttgtttctctccaaagcgaaattaagtatttataatttcaattgcctcgataagtttccaagtcactgaaatctgctgaaggttttactgtattgttgcacaactttaagataatttttgtctcaatgtcaacttttttcactgaataaaaatttaactgggtcaagaaaacacctctttgaaaatccactgtctctgtgtgtctcgagctgttctttagagcgcaataaagatggctgacgcagtctccaaacccc

SEQ ID NO: 390 - DNA, 1787 bp, HOMO SAPIENS
ttcttgacttgatgcaggcacagatttatcaagctcctcagtcaacaaacacatcaccggaagaaacatggaaggaaaggaattttaaaaggaaataccaatctctgtgcaaacaaagccttgtatattcatgtttgcaccaatctactgtgagatttatgaagaaaaacaaattgcggacaactctctatgtacacttacaaatgcctcagttgatgcttgtgggctgtttgtcagcgttctgtgataatgaacacatggacttctgtttattaaattcagttgacccctttagccaattgccaggagcctggatttttacttccaactgctgatatctgtgtaaaaattgatctacatccaccctttaaaagcattgatgaattaattagaactttagacaacaaagaaaaattgaaaaagaattctcagtaaaagcgaattcgatgttcaaaacaaactacaaagagacaagacttctctgtttactttctaagaactaatataattgctaccttaaaaaggaaaaaatgaacagcacatgtattgaagaacagcatgacctggatcactatttgtttcccattgtttacatctttgtgattatagtcagcattccagccaatattggatctctgtgtgtgtctttcctgcaagcaaagaaggaaagtgaactaggaatttacctcttcagtttgtcactatcagatttactctatgcattaactctccctttatggattgattatacttggaataaagacaactggactttctctcctgccttgtgcaaagggagtgcttttctcatgtacatgaatttttacagcagcacagcattcctcacctgcattgccgttgatcggtatttggctgttgtctaccctttgaagttttttttcctaaggacaagaagatttgcactcatggtcagcctgtccatctggatattggaaaccatcttcaatgctgtcatgttgtgggaagatgaaacagttgttgaatattgcgatgccgaaaagtctaattttactttatgctatgacaaataccctttagagaaatggcaaatcaacctcaacttgttcaggacgtgtacaggctatgcaatacctttggtcaccatcctgatctgcaaccggaaagtctaccaagctgtgcggcacaataaagccacggaaaacaaggaaaagaagagaatcataaaactacttgtcagcatcacagttacttttgtcttatgctttactccctttcatgtgatgttgctgattcgctgcattttagagcatgctgtgaacttcgaagaccacagcaattctgggaagcgaacttacacaatgtatagaatcacggttgcattaacaagtttaaattgtgttgctgatccaattctgtactgttttgtaaccgaaacaggaagatatgatatgtggaatatattaaaattctgcactgggaggtgtaatacatcacaaagacaaagaaaacgcatactttctgtgtctacaaaagatactatggaattagaggtccttgagtagaaccaaggatgttttgaagggaagggaagtttaagttatgcattattatatcatcaagattacattttgaaaaggaaatctagcatgtgaggggactaagtgttctcagagtgatgttttaatccagtccaataaaaatatcttaaaactgcattgtacagctccctccctgcgttttattaaatgatgtatattaaacaaagatcaataaaaaaaaaaaaaaaaaaaaaaaaaaaaaaaaaa

SEQ ID NO: 391 - DNA, 2500 bp, HOMO SAPIENS
tgcctggcctcctgccagcaacaagcaggagctgaaaaccagaagttgaggcgtgagtttggccactccgtagtgtgcacttggtgagggcagcagctcgccacagctgccagccatctgtccattcacccatctgtccatctggcagcccgctgttcagacctgtctgtctgtccgcccatctgtaagcccatctctgtcccattgtctatctgaccatctttctcttactgtcctctttgtctagctatctggcctatctgtcgatccatcttcgtgtctgtcttcagcccccacctgtttgtccatctgtccaattacctgtgactctgtgcatcttcttgtccattcatctgcccacccatccgtccctccgtctgcccaccagccgcccctctcctcctgggctgcagagccatggcccggggctacggggccacggtcagcctagtcctgctgggtctggggctggcgctggctgtcattgtgctggctgtggtcctctctcgacaccaggccccatgtggcccccaggcctttgcccacgctgctgttgccgccgactccaaggtctgctcggatattggacgagccatcctccagcagcagggctcacccgtggatgccaccatcgcggctctggtctgcaccagcgtcgtcaaccctcagagcatgggcctgggcggaggggtcatcttcaccatctacaatgtgacaacagggaaggtggaggtcatcaatgcccgggagacggtgccggccagccacgccccgagcctgctggaccagtgtgcacaggctctgccactgggcacaggggcccagtggatcggggtgcccggggagctccgtggctatgccgaggcccaccgccgccatggccgcctgccctgggcgcagctgttccagcccaccatcgcgctgctccgaggggggcatgtggtggcccctgtcctcagccgtttcctgcacaacagcatcctgcggccttccttgcaggcgtcaaccctgcgccagctcttcttcaacgggacagaacccctgaggcctcaggacccactcccatggcctgcactggccaccaccctggagaccgtggccacagagggcgtggaggtcttctacacggggaggctgggccagatgctggtggaggacattgccaaggaagggagccagctgacgctgcaggacctggccaagttccagcccgaggtggtggatgccctggaggtgcccctgggggactataccctgtactcaccaccgccgcctgcagggggtgccattctcagctttatcctcaacgtgctaagagggttcaacttctcaacagagtctatggccaggcctgaagggagggtgaacgtgtaccaccaccttgtagagacgctcaagtttgccaaggggcagaggtggaggctgggggaccctcgaagccacccgaagctccagaatgcctcccgggacctgctgggggagaccctggcccagctcatccgccaacagatcgatggccggggggaccaccagctcagccactacagcttggccgaggcctggggccacgggacaggcacgtcccatgtgtctgtgctgggggaggatggcagcgccgtggctgccaccagcaccatcaacacaccctttggagcgatggtgtattcaccacggacaggcatcatcctcaacaacgagctcctggacttatgcgagcgatgcccccggggttccggcaccaccccctcacctgcagtgagtggagacagggtgggtggagctcccggaaggtgctggcccccagttccaggcgagcgttccccatcctccatggtgccctccatcttgatcaacaaagcccaggggtcgaagctagtgattggcggggctggcggggagctcatcatctctgctgtggcccaggccatcatgagcaagctgtggcttggctttgacctgagagcggccattgcagcccccatcctgcatgtcaacagcaagggctgtgtggagtacgagcccaacttcagccaggaggtgcagaggggactccaagaccgtggccagaaccagacccagaggcccttcttcctgaacgtggtccaggctgtgtcccaggagggggcctgtgtgtacgccgtctcggacctgaggaagagtggggaggccgcaggctactaagacactgctctgcccagagctgaagtctggccccaccatgagtcctgtgtccaggccggacatggctgggggaccaactactctggcaggatctggacccctggcaggggagtccagctgagagtggaagaggtggcggggaccagctgggcagatgagaggctgagcctcatccctaaccccctttcccagagcccctggtggtcctgaaccggcccctctatccctccgcaggcctcttgcctggggccactctcccaccctctcgatctgtatatcctccagtccaagattaaagaggcggactgtggcctgaaaa

SEQ ID NO: 392 - DNA, 2308 bp, HOMO SAPIENS
aagaggatgcgaccagaggcagctgtcccgagcagcgcacggtgatcgcctcccccggaggaggaggcgcctagacggttgcctcctttcttgtttccccaccaccacccccgtaattacattggctgctggaggggaccgggagagacagaggaggcgcctggcttcccccgcacgcccgccacctctgctctttcccgtctcgggccaggatgactggagtctttgacagtctagtggctgatatgcactcgacccagatcgccgcctccagcacgtaccaccagcaccagcagcccccgagcggcggcggcgccggcccgggtggcaacagcagcagcagcagcagcctccacaagccccaggagtcgcccacccttccggtgtccaccgccaccgacagcagctactacaccaaccagcagcacccggcgggcggcggcggcggcgggggctcgccctacgcgcacatgggttcctaccagtaccaagccagcggcctcaacaacgtcccttactccgccaagagcagctatgacctgggctacaccgccgcctacacctcctacgctccctatggaaccagttcgtccccagccaacaacgagcctgagaaggaggaccttgagcctgaaattcggatagtgaacgggaagccaaagaaagtccggaaaccccgcaccatctactccagtttccagctggcggctcttcagcggcgtttccaaaagactcaatacttggccttgccggagcgagccgagctggcggcctctctgggcctcacccagactcaggtcaaaatctggttccagaaccgccggtccaagttcaagaagatgtggaaaagtggtgagatcccctcggagcagcaccctggggccagcgcttctccaccttgtgcttcgccgccagtctcagcgccggcctcctgggactttggtgtgccgcagcggatggcgggcggcggtggtccgggcagtggcggcagcggcgccggcagctcgggctccagcccgagcagcgcggcctcggcttttctgggcaactacccctggtaccaccagacctcgggatccgcctcacacctgcaggccacggcgccgctgctgcaccccactcagaccccgcagccgcatcaccaccaccaccatcacggcggcgggggcgccccggtgagcgcggggacgattttctaaccccagggagaactcgccagagactgagagcagagaccacttatcctcattgcttaccccgagccggggttccctcctcccggcccgctgccgccacccacctctcctgcaggctgcgacctgcagtggcccgtctcaggccctgctcactcccggggccaccaaacgggcccctctctcgggggaaccggacagcagcttggcaaaggcctccctaaaaggccgcatttctgacctgagccccgggtctcggctgtttcgagccccgcctcggacttgccttccctcccctccgggtgagcctgtctggcgccttcctcgccccgggctgagagctgggtcccgggagatggaagcctcccaggcgcgcgaggcttcccgggcgctctgaggcttctttctcctcgcccgctcccctgggctcagctcggacgctgcagttattgacctcccggtcccgcctgcccgccctcccccacgtggccccttgacccgggcggccccgccgcttctttccttcctgcagttcccagccctcggagcccccatcccttatcttacccccaccgcgctcccccaggagcgctccctcagctctctcctcatccatcaccagtggagtttttttatttgttatttttttaaaagtttaggtgcctttgcggatgacctcattttgacgttgaaaaaatgattttttaatatgtgaacactgcaaaaatgtgtttaaattatcttttttaaaacctattcaggattattagcctggacttggacacagagtttgtaaataaaggtgtctgtgcagattttcccactgatttatttgtataaaaatactcatcttttcagacttttttgtaaacccccagttgtgaaaactgcagtttagcagtgacctcagcaacccctcctttttattttttcctttaaaaacatttcagttaaattaagctactgatttggatttgttttatcgtatcctaaagtctttgttgttgaaatgaaaggtattttggggttatttattatgaaaacaacatgctcttaatgttgattttacaatatgaagagattatttaaataaattattgttttcattggaaaaa

SEQ ID NO: 393 - DNA, 1617 bp, HOMO SAPIENS
gcggtcagtggcggcgctgaagagaccggttgccgccatgatagaacagcagaagcgtaagggcccagagttgccgctggttccagtcaagcggcagcggcatgagttgctgttgggagcggggtctggcccaggagccgggcagcagcaggcgacgccgggagccttgctgcaagcgggacctccaagatgttcctcccttcaagccccaatcatgctgctctctggacatgaaggggaagtctactgctgcaagttccaccccaacggatccaccttagcatctgcaggatttgaccgactgatattactgtggaatgtctatggtgactgtgataactatgccacactgaagggacacagtggagcagtgatggaattgcattacaacacagatggcagtatgcttttctcagcatccacagataaaaccgtggctgtgtgggatagtgaaacaggtgagagggttaaaaggctaaagggacatacttcctttgtgaattcctgttatccagccaggagaggccctcagcttgtctgcactggcagtgacgatggcacagttaagctttgggacatccggaagaaagcagccatccagacatttcagaacacgtaccaggtgttagctgtgaccttcaatgacacaagtgatcagattatttctggtggaatagacaatgatatcaaggtctgggacctgcgccagaacaagctaacctacaccatgagaggccatgcagattcagtgactggcctgagtttaagttctgaaggctcttatcttttgtccaatgcaatggacaatacagttcgtgtctgggatgtccggccatttgcccccaaagagagatgtgtaaagatatttcaaggaaatgtgcacaactttgaaaagaaccttctgagatgttcttggtcacctgatggaagcaaaatagcagctggctcagccgacaggtttgtttatgtgtgggataccacaagcaggagaatattgtataagctgcccggccatgctggctccatcaatgaagtggctttccaccctgatgagcccatcattatctcagcatcgagtgacaagagactgtatatgggagagattcagtgaagatatggactggaagactccaaggccgcttgtctttgagacctcagactgcataagtgatgccaaatgttggatgtccaggctagcaccctcccttcagatgaccattgctagcaagaaacaggaggcggtggccatattccaaaaaccacttctgtcccatttcaccaggatgactaaggcaagctccctgtggcctctaaaaaccacctgccagatttcagggactgtttttttttttctttttcttttttcctgttttctaatgcaggcccaatgtgacaaatttgttggttgggatttttttttttttttgtaactggcttgtatgatattttctttctgtatttctctatatcattttgtattaaaagccaaatagatgcctttttacaagagccatgtggattggatttattgctgtcttttttttgaggcttgattgctataaatcagaatagagcatgatgtggccacagaatacaattcatttaaacttccaagaa

SEQ ID NO: 394 - DNA, 2088 bp, HOMO SAPIENS
ggtccgagttcggaatttcggttcaaggcccagttcctcggattgttcctgcgcaacttcagtttcccttccaggcacgggcaatgagtgtttggccgcgacgagttggaaagcccggatgcgtccttcggttgggcggggtgtctcagtgacgtcactgggggtataaaagggcctgggtggcgggcgcctgggcagagcgtcctagcagtgtcactgcgtgggttggtttgtgtagagaggcgtgagcgagcccgttgtccggagtgcacctgctgcctgttctgtccctcccgggagcccccgccgctgtcgccgtcgagtcgccatggaagtgcagaaagaggcacagcgcatcatgaccctgtcggtgtggaagatgtatcactcccgcatgcagcgcggtggcctgcggctgcaccggagtctgcagctgtcgctggtcatgcgcagcgcccgggagctctacctctcggccaaggtggaggccctcgagcccgaggtgtcgttgccggccgccctcccctctgaccctcgcctgcacccgccccgagaagccgagtccacggccgagacagcgacccccgacggtgagcacccgtttccggagccaatggacacgcaggaggcgccgacagccgaggagacctccgcctgctgtgccccgcgccccgccaaagtcagccgcaaacgacgcagcagcagcctgagcgacggcggggacgctggactggtcccgagcaagaaagcccgtctggaagaaaaggaagaagaggagggagcgtcatccgaagtcgccgatcgcctgcagccccctccggcgcaagcggagggcgcctttcccaacctggcccgcgtcctgcagaggcgcttctccggcctcctgaactgcagccccgcggcccctccgacggcgccgcccgcgtgcgaggcaaagcccgcttgccgcccggcggacagcatgctcaacgtgctcgtgcgggccgtggtggccttctgaggaccccgagcggcgctgccggagcccagagcgcgcgtcgaaccgtcggcccgagggcgcagacctgaggcgaggccacccccctccatcctgggggaagcgcccgcgaaaaccgtggagagaagccgccgcccgggctgctgagaggcccggagagggactctgtccccggggagccatcgccttcagtgtgcagggacggcaccgaggagtctgagccgggggcgcgggcgccttccgcagagacctgcgcccacaggtgctgtcttagtggactgggacgtgaacctttcgctctccttctggactgggagaagggaggcttgggtgttgtgttttttgttttgtttgtttgtttgtttttaaagatctcctcagggtcggacttcattttgtactgtgggctgtgctggccctttcaaggtttttcaagagttggttttgcgtttccaacctcggagaattccaggcactccccttccccctccgctgacatacttgtataagcggtcatcgttgcgtcatggggcaggcgtggggagcttcctgtcgccttgcgtgggtgtggggcctgggaggaggtcctggggcgtgcacccgccctgggcagtggggaggagagtggcctgagttacttcacccccgcgtgctgctggttaatgtcccgcgtctctgcaccttcgggtgggagcggggactgatctactttcacattctcaagtttttctcatctgcattagaggtgcccagtaggttcccaggttccagcgtgcccctccctcagacacacggacacaatcagccgagaagttcctggtctgaatcacgagaatgtggaggggtggggggtgtcagtggaaaggcataaggctgagctgagaccagttgctggtgaaactgggccaatctggggaggggaacatccttgccagggagtttctgagggtctgctttgtttacctttcgtgcggtggattctttttaactccgtctacctggcgttttgttagaaatgtcagataggaaaataaaaaccatttgagtaaaaaaaaaaaaaaaaaaaaaaaaaaaaaaaaaaaaaaaaaaaa

SEQ ID NO: 395 - DNA, 2523 bp, HOMO SAPIENS
cagcctgaggagctgctgcgagggtccgcttcgtctttcgagagtgactcccgcggtcccaaggctttccagagcgaacctgtgcggctgcaggcaccggcgtgttgagtttccggcgttccgaaggactgagctcttgtcgcggatcccgtccgccgtttccagcccccagtctcagagcggagcccacagagcagggcaccggcatggccaaagccgcggcgatcggcatcgacctgggcaccacctactcctgcgtgggggtgttccaacacggcaaggtggagatcatcgccaacgaccagggcaaccgcaccacccccagctacgtggccttcacggacaccgagcggctcatcggggatgcggccaagaaccaggtggcgctgaacccgcagaacaccgtgtttgacgcgaagcggctgatcggccgcaagttcggcgacccggtggtgcagtcggacatgaagcactggcctttccaggtgatcaacgacggagacaagcccaaggtgcaggtgagctacaagggggagaccaaggcattctaccccgaggagatctcgtccatggtgctgaccaagatgaaggagatcgccgaggcgtacctgggctacccggtgaccaacgcggtgatcaccgtgccggcctacttcaacgactcgcagcgccaggccaccaaggatgcgggtgtgatcgcggggctcaacgtgctgcggatcatcaacgagcccacggccgccgccatcgcctacggcctggacagaacgggcaagggggagcgcaacgtgctcatctttgacctgggcgggggcaccttcgacgtgtccatcctgacgatcgacgacggcatcttcgaggtgaaggccacggccggggacacccacctgggtggggaggactttgacaacaggctggtgaaccacttcgtggaggagttcaagagaaaacacaagaaggacatcagccagaacaagcgagccgtgaggcggctgcgcaccgcctgcgagagggccaagaggaccctgtcgtccagcacccaggccagcctggagatcgactccctgtttgagggcatcgacttctacacgtccatcaccagggcgaggttcgaggagctgtgctccgacctgttccgaagcaccctggagcccgtggagaaggctctgcgcgacgccaagctggacaaggcccagattcacgacctggtcctggtcgggggctccacccgcatccccaaggtgcagaagctgctgcaggacttcttcaacgggcgcgacctgaacaagagcatcaaccccgacgaggctgtggcctacggggcggcggtgcaggcggccatcctgatgggggacaagtccgagaacgtgcaggacctgctgctgctggacgtggctcccctgtcgctggggctggagacggccggaggcgtgatgactgccctgatcaagcgcaactccaccatccccaccaagcagacgcagatcttcaccacctactccgacaaccaacccggggtgctgatccaggtgtacgagggcgagagggccatgacgaaagacaacaatctgttggggcgcttcgagctgagcggcatccctccggcccccaggggcgtgccccagatcgaggtgaccttcgacatcgatgccaacggcatcctgaacgtcacggccacggacaagagcaccggcaaggccaacaagatcaccatcaccaacgacaagggccgcctgagcaaggaggagatcgagcgcatggtgcaggaggcggagaagtacaaagcggaggacgaggtgcagcgcgagagggtgtcagccaagaacgccctggagtcctacgccttcaacatgaagagcgccgtggaggatgaggggctcaagggcaagatcagcgaggcggacaagaagaaggttctggacaagtgtcaagaggtcatctcgtggctggacgccaacaccttggccgagaaggacgagtttgagcacaagaggaaggagctggagcaggtgtgtaaccccatcatcagcggactgtaccagggtgccggtggtcccgggcctggcggcttcggggctcagggtcccaagggagggtctgggtcaggccctaccattgaggaggtggattaggggcctttgttctttagtatgtttgtctttgaggtggactgttgggactcaaggactttgctgctgttttcctatgtcatttctgcttcagctctttgctgcttcacttctttgtaaagttgtaacctgatggtaattagctggcttcattatttttgtagtacaaccgatatgttcattagaattctttgcatttaatgttgatactgtaagggtgtttcgttccctttaaatgaatcaacactgccaccttctgtacgagtttgtttgtttttttttttttttttttttttgcttggcgaaaacactacaaaggctgggaatgtatgtttttataatttgtttatttaaatatgaaaaataaaatgttaaactttttcttgtctgttaa

SEQ ID NO: 396 - DNA, 1259 bp, HOMO SAPIENS
gtggtcttgcgagtggagtgtccgctgtgcccgggcctgcaccatgagcgtcccggccttcatcgacatcagtgaagaagatcaggctgctgagcttcgtgcttatctgaaatctaaaggagctgagatttcagaagagaactcggaaggtggacttcatgttgatttagctcaaattattgaagcctgtgatgtgtgtctgaaggaggatgataaagatgttgaaagtgtgatgaacagtgtggtatccctactcttgatcctggaaccagacaagcaagaagctttgattgaaagcctatgtgaaaagctggtcaaatttcgcgaaggtgaacgcccgtctctgagactgcagttgttaagcaaccttttccacgggatggataagaatactcctgtaagatacacagtgtattgcagccttattaaagtggcagcatcttgtggggccatccagtacatcccaactgagctggatcaagttagaaaatggatttctgactggaatctcaccactgaaaaaaagcacacccttttaagactactttatgaggcacttgtggattgtaagaagagtgatgctgcttcaaaagtcatggtggaattgctcggaagttacacagaggacaatgcttcccaggctcgagttgatgcccacaggtgtattgtacgagcattgaaagatccaaatgcatttctttttgaccaccttcttactttaaaaccagtcaagtttttggaaggcgagcttattcatgatcttttaaccatttttgtgagtgctaaattggcatcatatgtcaagttttatcagaataataaagacttcattgattcacttggcctgttacatgaacagaatatggcaaaaatgagactacttacttttatgggaatggcagtagaaaataaggaaatttcttttgacacaatgcagcaagaacttcagattggagctgatgatgttgaagcatttgttattgacgccgtaagaactaaaatggtctactgcaaaattgatcagacccagagaaaagtagttgtcagtcatagcacacatcggacatttggaaaacagcagtggcaacaactgtatgacacacttaatgcctggaaacaaaatctgaacaaagtgaaaaacagccttttgagtctttctgatacctgagtttttatgcttataatttttgttctttgaaaaaaaagccctaaatcatagtaaaacattataaactaaaaaaaaaaaaaaaaaaaaaaaa

SEQ ID NO: 397 - DNA, 3981 bp, HOMO SAPIENS
cgggctgagagggacctggggagctgcggcctggccggggcggcgcactcaggtggcctcgcttccctgcgggtcaccgcccgccactcgcacagctaggtcggcctgttgggatcgggagaggtgggcgcacgagttttagtgcgggagtccggggtgcgggcggagtcctattgtccccgtgcacccgggcggcagcacctccgggtccctctttaaaccgagcgtccggcgacctttctttgtgcttagggagtcgaaagcggcatcttctccgagagaagtcgcctactggggggtggcgctggggaggtaacaatgggcgcccattgtcctccgagggtccaacggtgacccccccccgcgcgcgcgcccggccaccggttggccccgggccagggcacaggtaccgcggctgggagggtcggccccgctgcccgcgccctccgccccgccccagtgagtccccgcgccgccggccccgccccgcgccgccccgccctccgcaggttcagtcctcgcgtccggccgccccgcgctcagtcgcgcgcaccttctctcgcggccgggggaccgcagcgcggggctagcccggagacccggccaccggcctggggcgccttcacgccgtctcggagcggataatgcggtgagcaggcaccacgccggcagactcggctggatctgcgcacagcggcagggattgcgtgcgcccgcgggaggcccggggcagcggctgggatcctcagcggcggccggtttgtcctggttgtggtcaagactggatgatgtaactggctctctaggaagcctcacttggccgtaacctcaggaaggttctctttgaccccatctcatttcgaagccacttctgaagccacttgagaaaaatgatgtgacagttcctatcaaaaaggattcagaaacatataccatctgtgaagaaagtggccctttctcccgcttgcaaaatagacattctcaaattccaaaatgccagccaagaccccaatttacctgaaagcagccaataacaagaaaggaaagaaatttaaactgagggacattctgtctcctgatatgatcagtcccccgcttggagactttcgccacaccatccacattggcaaagagggccagcacgatgtctttggagatatttcctttcttcaagggaactacgagcttttacctggaaaccaggagaaagcacacctgggccagttccctgggcataatgagttcttccgggccaacagcacctcggactctgtgttcacagaaacgccctccccggtgctcaaaaatgccatctccctcccgaccattggaggatcccaagctctcatgttgcccttattgtcaccagtgacatttaattccaaacaggagtccttcgggccagcaaagctgcccaggcttagctgcgagcccgtcatggaggaaaaagctcaggagaaaagcagtctgttggagaatgggacagtccaccagggagacacctcgtggggctccagcggttctgcatctcagtccagccaaggcagagacagccactcctccagcctgtccgaacagtaccccgactggccagccgaggacatgtttgaccatcccaccccatgcgagctcatcaagggaaagactaagtcagaggagtccctctctgaccttacaggttccctcctctccctgcagcttgatcttgggccctcacttttggatgaggtgctgaatgtaatggataaaaataagtaacaagatgccaacttttttcctttggggtaaaaggtacaaaaacaaactaaccacagttgaagagaagggcttccggagctgtatttgcagttttgtgttgggttttctaaaataatattcttacaaagtatttttttacctgttatgccctgtttgcaaaaacaatttagaaaaaaacaacaaagcaaaacctatcttggcaaaaaaaggaagtgagtcagagcccattttcaggaggcattggtgatgttcggctcacatattgtttgcagacacacaagaaatctggcttggccaggattggcactagctatgaagggctgagcgagtcacattaaggaacttcacggaactttatagcactccgacattttctgagcaagaggaagtcaaaatttatttaacacctaagcctttttgtagactcttttctatatattgcttaggctcaccatagcgaattctccagtgttaaaacttttctgttttcacatttgaactttatgggttttggggattttcttgtagttcttatatatccctatatattatatctatattgcaaaattttgactgtcagctacatgttggtaagacacaggcaaagtattactgtaactaagttatttttaaagttaaaatatatttttacgtgcctttggctttttattgcagagtctacattttatagattctacatcagatgttgtcacttatttccattgggattccattgtaagctgtgtatgtgcgtgtttggaaaagtgtattcatacttagtttttttttcttcatctgttatcatacttttaacagcaaccaataacggattgtaaagtgtaaaggcacaggttactcatgatgcttctgcagagactgtgggctacaccacatatgttatttggaaatataggtattttagtacagtacatacttgcattacataggtacttcaagcaacacaataaaaagtaaatgataaagtgaacttgcttgtttatagtaataaacaagaccataagagaataagtatagctagagaaattgcttctctgaaatgtacatgagcccttaaggtaagagatgatttccatctactctcattttgattacttccttatggtttgagaggctagaaactgagcctctctacttttggaaaaatgaacatgtgaggtcagatttttttttttttttttaagtcagcactgatgccaccctctcagtggtcatttctgagcatcttcctgacttgaacaccttctacagcaaactcttgcaagtccagtttcatccctgtaaggcaaatgtcttttcacgcagaaagtgccatatagacgagataaaggcagctaaaacgagggcagtagagagcacttacccgaccccaaggtgccagagatgccctgaggatggtggttaaggaaacaggagcaggaaatgtacacacagattcctgtccctttgccaactactccttccccatcaaagaaaaacacttgcacacagtaactaccagctccttctctcaaacttgtatttctcctggaaatgtatctcagaaatgacctcctctcccaaccacttcaacgattctttctttgggtttggggttcttgcagttctatcatctaaaataacctttggactgcaggtaaaatgcaattaggacaactaaccaagtagacgaaacaagttcccctaggcaggggtgtccaatattttagcttccctggaccgcattggaagaattttcttgggccacatgtaaaacacactaacactaaccatagttgatgagcttaaaaaaataaaaatagaaaattgcaaaaaaaaaaaaaaaaaaaaatctcagactgttttaagaaagtttaaaaatttgtgttggacttcatgcgggccacaggttggacaagcttgccctagggcattgtgtgctttccgtaacttctcagttgtatttcgttatccatgactctccagtgttttttctgttggaccacacccgtcacagttcacagttccaaagagaaatttcccagcctattctaaatcttgttaatgacgaagagtccaatgtatctcattatttgtagccaattttagactcttttcaatacctcccccccattttaattagtattgatcatattcagtctttcattttactcttcatctgtagcgtgacctcaaggtaaagatgaaactatttcatgaaaaggg

SEQ ID NO: 398 - DNA, 3329 bp, HOMO SAPIENS
cagtggggcgttgtttcgtccgatatccgcgtttcagtctccgcccatacccctccgggttaggcggctgtagcggagctcgaaaagagtggcgcagggtcgcgcggccccgcctccttccccgcccagcgaagctctctgaccacccctcttttctagagttctgcctcgcttcccggcgcggtcgcagccctcagcccacttaggataatggcgacagctgaggtactgaacattggtaaaaaattatatgagggtaaaacaaaagaagtctacgaattgttagacagtccaggaaaagtcctcctgcagtccaaggaccagattacagcaggaaatgcagctagaaaaaaccacctggaaggaaaagctgcaatctcaaataaaatcaccagttgtatttttcagttattacaggaagcaggtattaaaactgccttcaccagaaaatgtggggagacagctttcattgcaccgcagtgtgaaatgattccaattgaatgggtttgcagaagaatagcaactggttcttttctcaaaagaaatcctggtgtcaaggaaggatataagttttacccacctaaagtggagttgtttttcaaggatgatgccaataatgacccacagtggtctgaggaacagctgattgctgcaaaattttgctttgctggacttcttataggccagactgaagtggatatcatgagtcatgctacacaggctatatttgaaatactggagaaatcctggttgccccagaattgtacactggttgatatgaagattgaatttggtgttgatgtaaccaccaaagaaattgttcttgctgatgttattgacaatgattcctggagactctggccatcaggagatcgaagccaacagaaagacaaacagtcttatcgggacctcaaagaagtaactcctgaagggctccaaatggtaaagaaaaactttgagtgggttgcagagagagtagagttgcttttgaaatcagaaagtcagtgcagggttgtagtgttgatgggctctacttctgatcttggtcactgtgaaaaaatcaagaaggcctgtggaaattttggcattccatgtgaacttcgagtaacatctgcgcataaaggaccagatgaaactctgaggattaaagctgagtatgaaggggatggcattcctactgtatttgtggcagtggcaggcagaagtaatggtttgggaccagtgatgtctgggaacactgcatatccagttatcagctgtcctcccctcacaccagactggggagttcaggatgtgtggtcttctcttcgactacccagtggtcttggctgttcaaccgtactttctccagaaggatcagctcaatttgctgctcagatatttgggttaagcaaccatttggtatggagcaaactgcgagcaagcattttgaacacatggatttccttgaagcaggctgacaagaaaatcagagaatgtaatttataagaaagaatgccattgaattttttaggggaaaaactacaaatttctaatttagctgaaggaaaatcaagcaagatgaaaaggtaattttaaattagagaacacaaataaaatgtattagtgaataaatgcttctctagatccatattaataaacatgagcatctaacccctcctttcttaggctagacaccaagatatttcagccagcctttatcattcctcttactttatcctttttccttaagtattggtggtcactactattgagtttcttccttaacactgattaaatgatcttaactccctcagctaaaactggcattactgactcccagctatatttctccagacttgcatttttttttttttttttgagacagggtctcactgtcgcccaggctggagtgcagtggcgtgatctcagttcactgctgctttccctcctgggctcaagcagttctcccacctcagcctctcgactaacagggactataatcttgcagcaccatgccgagctaattttattttttgtagagatgagctctcactatgtcacccaggttcgtctcaaactcctgaaccctagtaattctcctatctcagcctcccaaagtgctagggttacagacatgagccactgtgcctgtctagacttgtactttcaactgtccatttctccctgtctgtcccatgggcactcatgaaaaaacagaatgctcccaactttattcatcttccaagcctgtagctcttggtatactcactgttgcaagtcagaagcttgatttcatcattgatgtttttctcacgtttcacatctcactcatcaccaagtcatgttggtgttaatttctgattaacccttgaatttaccgtcttctcatcctctgtacaaaagcctcaagtgagggtcaaattcaacattatcctgatctagacagcccccattctcaatccacccttttccaagttgattgcccaaggacttctaacaataaactctcttttgcaccacagacttctttgaaaatatacatgctgttgaccctctctgtagaaaaccgcacacataaaacttaccaacagatttcattggttcttgggttctcccgaagcctatccatggtttatagattaagaattgatgaggtagctgggcacagtggctcacacctacgatcacagcacttcgggaggctgaagcaagcagatcacttgaggtcaggagtttgagaccagcctggccaacatggtgaaaccctgtctctactaaaaatacaaaaagtagccagccgtgatgacaggcacctgtaatcccagctactcgggaggctgaggcatgagaattgcttgaacccgggaggcggaggttgcagtgagcctagatcatgccactgcactccaacctgggcagcagagcaagactctgtctcaaaaggggaaaaaaaaaattgctgatgtgacccatgaagggaactcattttcctcgtaattttggactgccacacattggtacctttagttctctgaaggcccacgtttttatcattaagacctatttgttagctagtagagctttatgttcgctgtccatgaaaccttctgtaaccacagtgactacaagtagttctttctctattgaattattaggtccagaatagaagatgtcattgtacactttatttccctcacactgtgttatgctctgatgtgctatgcttagctatctgtcagagattagtaaattataaaactcatgtgtactacttaagtttatatcttatgctagtttataagaacaattaaaaggacttagaagattaactttggtaaaaaaaaaaa

SEQ ID NO: 399 - DNA, 3702 bp, HOMO SAPIENS
gagttccagcagtccgcgagctgccgtcggctccgcggggggggcgggccgggcaccccggggcgcggaggagcgctcctcgcttctctccttcccccctgccgcactccgccggaccctcccgccggcccgcgccgctgcactcgccctctcctctcgccccccggcaaactttcggcccctccccgcccctcgcccgttattcgtcgtggctcaagcccggccacgccgccccaagggctcctcccgacctcccggcctgccgctccggccactgcgggatccagaaacatgtcgaccacacttctgtccgccttctacgatgtcgacttcttgtgcaagacagagaaatccctggccaacctcaacctgaacaacatgctggacaagaaggcggtggggacgcctgtggccgccgcccccagctcgggcttcgcgccgggattcctccgacggcactcggccagcaacctgcatgcactcgcccaccccgcgcccagccccggcagctgctcgcccaagttcccgggcgccgctaacggcagcagctgcggcagcgcggcggccggcggtccgacctcctacggcacccttaaggagccgtcggggggcggcggcacagccctgctcaacaaggagaacaaattccgggaccgctcgtttagcgagaacggcgatcgcagccagcacctcctgcacctgcagcagcagcagaaggggggcggcggctcccagatcaactccacgcgctacaagaccgagctgtgccggcccttcgaggagagcggcacgtgcaagtacggcgaaaagtgccagttcgcgcatggcttccacgagctgcgcagcctgactcgccatccgaagtacaagaccgagctgtgccgcacctttcataccatcggcttctgcccctatgggccgcgctgccacttcatccacaacgcggacgagcggcggcccgcgccgtcggggggcgcctccggggacctgcgtgcctttggcacgcgcgatgcgttgcacctgggcttcccgcgggagccgcggcccaagttgcaccacagcctcagcttctcgggcttcccgtcgggccaccatcagcccccgggcggcctcgagtcgccgctgctgctcgacagccccacgtcgcgcacgccgccgccgccctcctgctcttcggcctcgtcctgctcctcctccgcctcctcctgttcctcggcctccgcggcctccacgccctcgggcgccccgacatgctgcgcctccgcggcggccgcggctgcggccgctctgctgtacggcaccgggggcgccgaggacctgctggcgccgggggccccgtgcgcggcctgctcgtcggcctcgtgcgccaacaacgccttcgccttcggtccggagctcagcagcctcatcacgccgctcgccatccagacccacaactttgccgccgtggccgccgccgcctactaccgcagtcagcagcagcagcagcagcagggcctggcgccccccgcgcagccgccggcgccgcccagcgcgaccctccccgccggggccgccgcacctccctcgccgcccttcagcttccagctgccgcgccgcctgtccgactcgcccgtgttcgacgcgccccccagccccccggactcgctgtcggaccgcgacagctacctaagcggctccctgagctccggcagcctcagcggctctgagtctcccagcctcgaccctggccgccgcctgccaatcttcagccgcctctccatctccgacgactgaggcaagagggcgccagtgaggaggaagggaaggcggttcagagatgttggaggacacccctcgccatctcgcccttgctgggggcacgggagtggggggggtgacatgggccctaggcagactgcaagcccgaccgagcacttggactcgaactctgtgccgggaggggcccccacccctcctttttcggtttcctcttgtctttttttttttatttttattacgaagtttcattctttttgagcaaaaaagtcgaactttttctgttgaacaaaatattcacaacagggcagttgtgatacgaatagaacaaaaaaaaaaaaaaaacacttaaactttgttaggactccgatgagtttgggacttcaggaaaaatcaacccagcaccagcagctaccaaccaccattccatctcttcacttgaacagcattagttaagtccagatgtgggaacccttctcttggaagaagttcctaattgtgtctcagaccggtgtaaacaaaccagccagccgccaccttgctaaacctataagctttttaaaatccaatatattctgccaagaatatgccttgatagttagccctcagcccataggtgttttttgttttttaacagaattatatatgtctgggggtgaaaaaacccttgcattccaaaggtccatactggttacttggtttcattgccaccacttagtggatgttcagtttagaaccattttgtctgctccctctggaagccttgcgcagagcttactttgtaattgttggagaataactgctgaatttttagctgttttgagttgattcgcaccactgcaccacaactcaatatgaaaactatttaacttatttattatcttgtgaaaagtatacaatgaaaattttgttcatactgtatttatcaagtatgatgaaaagcaatagatatatattcttttattatgttaaattatgattgccattattaatcggcaaaatgtggagtgtatgttcttttcacagtaatatatgccttttgtaacttcacttggttattttattgtaaatgagtacaaaattcttaatttaagagattgtatgtaatatttatttcattaatttctttccttgtttacgtaaattttgaaagattgcatgatttcttgacagaaatcgatcttgatgctgtggaagtagtttgaggaacatcctatgagttttcttagaatgtataaaggttgtagcccatccaacttcaaagaaaaaaatgaccacatactttgcaatcaggctgaaatgtggcatgcttttctaattccaactttataaactagcaaaaaagtgtttgcttattccaccagttctactgtgacatactcgagtataaagacatgtagcaataacggggagtggggggggagtctcacagtgcctttggaagggcccgaacttgccttaaatcttcctcaaccaaataagtattttattagtgcttgagagaatctgaatgtaggatgggttcaactgcacaaaaggaaaagatttttaccactttttttatatagatataaagtgaagcaaccgccttagtgctgaaatatgtagtacatgaatatgccttgtttaattacagaaaattccaaaacttgtactatttttttttccatgtagaaaggcaggaatgtctcctaagctttcctggacagcagatgaatgagcggtagctttagtttgtacgtaggtacagttggagcactatatgtactctctggactactttggacagaagtaggtttttgaatgtaacaagataagtcaacttgagttgtaatatattttggggaatcagctcactacaaattgtgactgtaaacattgtactgtaaatgttttgtagttttcccccaataaaatttttgggaaaaaaaggtaaaaaaaaaa

SEQ ID NO: 400 - DNA, 1312 bp, HOMO SAPIENS
gcggccgcccgcgagcggggcggtgccacgtacggctccggaagaagcgacggaatctgctagggcacaagagagacgggcgctcgggctctcgcagtcctcttccgtcagtgtcttttgcttcgactcccggcggagcgcgcaacgtggagtgacgtgcaggggccaagtgcaacccaggcagccacggctgtttcggagctcaggactctaaaatggcagagcagctttctccaggaaaggcggtggatcaggtgtgcaccttccttttcaaaaagcctgggcggaaaggggctgctggacgcagaaagcgcccggcctgcgacccagagcccggagaaagcggcagcagtagcgacgaaggctgcactgtggttcgaccggaaaagaagcgggtgacccacaatccaatgatacagaagacccgtgacagtggtaaacagaaggcggcttacggcgacttgagcagcgaagaggaagaggaaaatgagcccgagagtctcggcgtggtttataaatccacccgttcggcgaaacccgtgggaccagaggatatgggagcgacagctgtctatgagctggacacagagaaagagcgcgatgcacaagccatctttgagcgcagccagaagatccaggaggagctgaggggcaaggaggatgacaagatctatcggggaatcaacaattatcagaaatacatgaagcccaaggatacgtctatgggcaatgcctcttccgggatggtgaggaagggccccatccgagcgcccgagcatctacgtgccaccgtgcgctgggattaccagcccgacatctgtaaggactacaaagagactggcttctgcggcttcggagacagctgcaaattcctccatgaccgttcagattacaagcatgggtggcagatcgaacgtgagcttgatgagggtcgctatggtgtctatgaggatgaaaactatgaagtgggaagcgatgatgaggaaataccattcaagtgtttcatctgtcgccagagcttccaaaacccagttgtcaccaagtgcaggcattatttctgcgagagctgtgcactgcagcatttccgcaccaccccgcgctgctatgtctgtgaccagcagaccaatggcgtcttcaatccagcgaaagaattgattgctaaactagagaagcatcgagctacaggagagggtggtgcttccgacttgccagaagaccccgatgaggatgcaattcccattacttaggtttcccataattcttaaatttaaaaaataaacgttttgttcttttggaaaaaaaaaaaaaaaaa

SEQ ID NO: 401 - DNA, 2843 bp, HOMO SAPIENS
cgctggggcgctttccgaggaaattcgggactcgagtttcccggggaagaggcgcggcctgagcccggcgagggtggggagggcaggcgcaggtggaccccggcgccccccgagccccgctgtgaccttggccgcgggggaggggctgggccgctgcggggcagtcgcggccgccagagggggcagcggagaagaacttgcccaacttggcggcgcgggctggggcggctctgcgcctccgcgcccgcctccccggcctccgccttctcccctcccgcgagcctcctcccctcccgcgagcctcctcccctgggccctcctcccgtcctccccgccgccgccggtcccggtgcgcgcccatccctgcccgcagccccgcgcgccggccgagtcgctgagccgcggctgccggacgggacgggaccggctaggctgggcgcgccccccgggccccgccgtgggcatgggcgcactggcccgggcgctgctgctgcctctgctggcccagtggctcctgcgcgccgccccggagctggcccccgcgcccttcacgctgcccctccgggtggccgcggccacgaaccgcgtagttgcgcccaccccgggacccgggacccctgccgagcgccacgccgacggcttggcgctcgccctggagcctgccctggcgtcccccgcgggcgccgccaacttcttggccatggtagacaacctgcagggggactctggccgcggctactacctggagatgctgatcgggacccccccgcagaagctacagattctcgttgacactggaagcagtaactttgccgtggcaggaaccccgcactcctacatagacacgtactttgacacagagaggtctagcacataccgctccaagggctttgacgtcacagtgaagtacacacaaggaagctggacgggcttcgttggggaagacctcgtcaccatccccaaaggcttcaatacttcttttcttgtcaacattgccactatttttgaatcagagaatttctttttgcctgggattaaatggaatggaatacttggcctagcttatgccacacttgccaagccatcaagttctctggagaccttcttcgactccctggtgacacaagcaaacatccccaacgttttctccatgcagatgtgtggagccggcttgcccgttgctggatctgggaccaacggaggtagtcttgtcttgggtggaattgaaccaagtttgtataaaggagacatctggtatacccctattaaggaagagtggtactaccagatagaaattctgaaattggaaattggaggccaaagccttaatctggactgcagagagtataacgcagacaaggccatcgtggacagtggcaccacgctgctgcgcctgccccagaaggtgtttgatgcggtggtggaagctgtggcccgcgcatctctgctttacattcagcccatgatgggggccggcctgaattatgaatgttaccgattcggcatttccccatccacaaatgcgctggtgatcggtgccacggtgatggagggcttctacgtcatcttcgacagagcccagaagagggtgggcttcgcagcgagcccctgtgcagaaattgcaggtgctgcagtgtctgaaatttccgggcctttctcaacagaggatgtagccagcaactgtgtccccgctcagtctttgagcgagcccattttgtggattgtgtcctatgcgctcatgagcgtctgtggagccatcctccttgtcttaatcgtcctgctgctgctgccgttccggtgtcagcgtcgcccccgtgaccctgaggtcgtcaatgatgagtcctctctggtcagacatcgctggaaatgaatagccaggcctgacctcaagcaaccatgaactcagctattaagaaaatcacatttccagggcagcagccgggatcgatggtggcgctttctcctgtgcccacccgtcttcaatctctgttctgctcccagatgccttctagattcactgtcttttgattcttgattttcaagctttcaaatcctccctacttccaagaaaaataattaaaaaaaaaacttcattctaaaccaaaacagagtggattgggctgcaggctctatggggttcgttatgccaaagtgtctacatgtgccaccaacataaaacaaaaccaagccttggctcgttctcttctctcttcaatctctggaaaaataagtacatatagttgataacccctcttagcttacaggaagctttttgtattaattgcctttgaggttattttccgccagacctcaacctgggtcaaagtggtacaggaaggcttgcagtatgatggcaggagaatcagcctggggcctggggatgtaaccaagctgtacccttgagacctggaaccagagccacaggccccttttgtgggtttctctgtgctctgaatgggagccagaattcactaggaggtcatcaaccgatggtcctcacaagcctcttctgaagatggaaggccttttgcccgttgaggtagaggggaaggaaatctcctcttttgtacccaatacttatgttgtattgttggtgcgaaagtaaaaacactacctcttttgagactttgcccagggtcctgtgcctggatgggggtgcaggcagccttgaccacggctgttcccctcacccaaaagaattatcatcccaacagccaagacccaacaggtgctgaactgtgcatcaaccaggaagagttctatccccaagctggccactatcacatatgcttactcttgcttaaaattaataaatcatgttttgatgagaaaaaactattcta

SEQ ID NO: 402 - DNA, 1218 bp, HOMO SAPIENS
ggcgactgagtgagatacccagctgtgcggagctaggacgcggaacatcccagaggccagcatcaacatgcaagagctgactctgagccctggcccagccaagctgacccctacactagaccctacacaccggatggagctgatcctgagtaccagcccagctgagctgactctggatcctgcgtgccagccaaagctgcccctggattccacatgccaaccagagatgaccttcaatcctggtccaactgagcttaccctggatcctgaacaccagccagaggagaccccagctcctagcctggctgagttgaccctggagcctgtgcaccgccgacccgagctcctggatgcttgtgctgacctcatcaatgatcagtggccccgcagccgcacctcccgcctgcactccctgggccagtcctcagatgccttccccctctgcctgatgctgctaagcccccaccccacacttgaagcagcacccgttgtggtgggccatgcccgcctgtcacgggtgctgaaccagccccagagcctcttagtggagacagtggtggtggcccgggccctgaggggccgtggctttggccgccgcctcatggagggcctggaggtctttgctcgggcccggggcttccgcaagctgcatctcaccacccatgaccaggtgcacttctatacccacctgggctaccagctgggtgagcctgtgcagggcctggtcttcaccagcagacggctgcctgccaccctgcttaatgccttccccacagccccctctccccggccacccaggaaggccccaaacctgactgcccaagctgccccaaggggtcccaagggacctccattgccaccaccccctcccctacctgagtgcctgaccatctcacccccagttccatcagggcccccttcaaaaagcctgctggagacacaatatcaaaatgtgagggggcgccccatattctggatggaaaaagacatctgaggccatccagggcaaggaactgtctttctggttcaatagactgccccgacagtctacaagcctcagcccactgaccatacctcagcccctagcccctggggggcagctttaacctgggcatgtttcctgggtaccagtggggccaggaggtggctctggctcagagccgtcagtgtggctgaataaaggctctcttgggtaaaaaaaaaaaaaaaaaaaaaaaa

SEQ ID NO: 403 - DNA, 1388 bp, HOMO SAPIENS
ctggccaccaagcgcctccgtggacacgcacttcctgcgaggcctccgtgcgcaccttggccgagccgaaccgagccgagtcctgtccttccaggccgttcgcaatggtggatgagttggtgctgctgctgcacgcgctcctgatgcggcaccgcgccctgagcatcgagaacagccagctcatggaacagctgcggctgctggtgtgcgagagggccagcctgctgcgccaggtacgtccgccgagctgcccggtgcccttccccgaaacgtttaatggcgagagctcccggctccccgagtttatcgtgcagacggcgtcttacatgctcgtgaacgagaaccgattctgcaacgacgccatgaaggtggcattcctaatcagcctcctcaccggggaagccgaggagtgggtggtgccctacatcgagatggatagccccatcctaggtgattaccgggccttcctcgatgagatgaaacagtgctttggctgggatgacgacgaagacgacgacgacgaagaagaggaggatgattattaggccctcgaccctcgggcctcgggggggagggccctgcacgccgccaccccctccccgcagccctcaccccgccaggagccactgctctcccccttgccctccggtccccttacctacccgcgcccgtctgctctctctcttcatttctccgtagtgcttgtctttgttccaggaatagcgctccagttacctgctgctggggtcggggctggagcctcactcactcggaagtgcttggaagtgtcatctaccctggccatccccgggatccctcccctgctaatctgaactgtgtcctgaaccccagctattggccaggcccctgttacaaactgcgcagaccacccatagccctgctgctgccacctgccctgctgccaggcttacatcttcccagagaactatgctgccacttcacatccactcaccacatcccacctacagactaccacctttcgagatcaggaccaacctggaaaatgccagagttggctatgccttttcagacattgatttggacagctcaccaacccctgaaggggccgttcagcctggttagttttctacctactccgagtgtcctcccctgccccaccagattgctgcaggggcgcggtgtgcctggcagccaaattgttgacacttcttttttcctatgcactggttttacacagctgtcatttttctttcaaaattgcagcagtcccacagatgtgtgcatttggacaaatagtacttaaaaacaaaacaaacaagcactcagcccagctcctcaatactacctggaaaaagcattggcattattttcaataaatatcaagcactaaaaaaagaaaaaaaaaa

SEQ ID NO: 404 - DNA, 2556 bp, HOMO SAPIENS
agtgtgggaggggcagtggaactggagtcagctaatggctgacgcactacgcgcagagggaaagacgggtcaccaatagcgacacggatatggccccgcgggcggggtttaggcccaaagtggtgtcggagcagcgcctattagtgtcatcctcaccgtcacggccggcgcctcctcctggattcattcactcgctcttttcattcacgaaggtagtgaggcctagtggaaagccatggagagcgctctccccgccgccggcttcctgtactgggtcggcgcgggcaccgtggcctacctagccctgcgtatttcgtactcgctcttcacggccctccgggtctggggagtggggaatgaggcgggggtcggcccggggctcggagaatgggcagttgtcacaggtagtactgatggaattggaaaatcatatgcagaagagttagcaaagcatggaatgaaggttgtccttatcagcagatcaaaggataaacttgaccaggtttccagtgaaataaaagaaaaattcaaagtggagacaagaaccattgctgttgactttgcatcagaagatatttatgataaaattaaaacaggcttggctggtcttgaaatcggcatcttagtgaacaacgtgggaatgtcgtatgagtatcctgaatactttttggatgttcctgacttggacaatgtgatcaagaaaatgataaatattaatattctttctgtttgtaagatgacacaattggtactgcctggcatggtggaaagatccaaaggggctattctgaacatttcatctggcagtggcatgctccctgtcccactcttgaccatctattctgcaaccaagacttttgtagatttcttctctcagtgcctccatgaggagtataggagcaagggcgtctttgtgcagagtgtcctgccatacttcgtagctacaaaactggctaaaatccggaagccaactttggataagccctctccggagacgtttgtgaagtctgcaattaaaacagtcggcctgcaatcccgaaccaatggatacctgatccatgctcttatgggctcgataatctcaaacctgccttcttggatttatttgaaaatagtcatgaatatgaacaagtctacacgggctcactatctgaagaaaaccaagaagaactaagcattgataactgcattgtaacttggccagatgctccagcatatgcacgttcactgcaaagcaccctactggttttgaaaatctgaccttgtcatttcaatagttattaacatgactaaatattatcttaattaagaggaaaatagaagttgcttttaggggtttctgacatatattctggatactatccgaggtaattttgaagtttaatataaatgctcatatcaaatgaatatagaactaatattgtcgggaacacctaatagaaaggaatactattatagcaaatcacagaatgatagactcaagcataaaacttggcagttttatctgcttcaaaatgccattgatcattattcctgtattttctctgaaactgattataaaaaccaatgtccagctactcttttgtttttgacacttgaagaaatggagatcgatttgatttgtttataagcagacacactgcaatttacaaagatctctttacggttttataaaattatcttccagtttgtacatttatatggaattgttctttatcaagggtagctaatgacatgaaaataattgtgaaatatggaattatttctgacacatgaagcccactaaactatgctttcttataatgcatatttcttctcagtttaaatgtatgtaaatatcgaagctatatggtatgatttataaagataaatgggccaaagtgtacattgagactggcagccatctatggtaccactgaaaccctgacccagaaaagtggcttgcttggacacccagctgcctttgtttctgcattaaaccaatattgatcacacatatgacacaggctagtcctataaaagtaatgacttcatagaaatggcattataatttttaagttgatactctacaggtagctattgatataattagttttaataaaacatgctgcaaccatggtatacaacaaaaatacatttctttggtgattgaaattaaggccgtatttacaatgacttaatataagactgacttttatcctgcttcataacttgtatggagaactcaccaagaaagaattcaatactgtgaaatatgcagcaagaagattggtctttacctaggctgtgtttcctaagctctgagttttcagcaccagtagatttgtattaaaagaaaaaaaaatggggccttagcttctggcttttaattttgccagctaaggacataaaacaaaaataaacaaacaaaaacaaatagccatctgctatcagcatcattatgtaaaagaaaatatattttagcccctaaaattaggaagaatgtaatctcagaataaaggttgtcatttaagttgaataaatatatagctttatgaaaaacacaaaaaaaaaaaa

SEQ ID NO: 405 - DNA, 2830 bp, HOMO SAPIENS
agctgggggcggggccggaagctctttccccgcgactgcgccacgtctgaggcggctgtggccgcgtcggtgtccgcgtcgaggagccggggcagggcacgatggcggactgggctcgggctcagagcccgggcgctgtggaagagattctagaccgggagaacaagcgaatggctgacagcctggcctccaaagtcaccaggctcaaatcgctcgccctggacatcgatagggatgcagaggatcagaaccggtacctggatggcatggactcggatttcacaagcatgaccagcctgcttacagggagcgtgaagcgcttttccacaatggcaaggtccggacaagacaaccggaagcttctatgtggcatggccgtgggtctaattgtggccttcttcatcctctcctacttcttgtccagggcaaggacgtgagccagtgggagctggtgtctgtgggtgccaagggcagccagggtcttccctgcctggtgttttgggctccagaggacttacctacaaaatactcctttgcaatgataattgtgggtcaggaatcttcttcctgtgtggcaggaggctgcggctgcctgtgacctgatgagctcatgttggctggtcccatgtgtgaaagggactctctcggggaaaccaaggcccagcccctcccccctcccccaggtgctagagagccaggcagagctggggccacagcgtgtctggagaagccaggtctgagcagagcagctggtgaatcccagacgtggccacctgtggcttgcagcccttctccccgcgcttgggactctgacatcttaaggctgcacggtcgtgtccttgtctgggtgaggccatgtctgtgatccaaggttcctggaactgacacaggaaggggctgtgaaccctaagtgggtgtcatctcctccgaccgaggcttctcaccctggagatggcagttactcctggccatggttgctgagcatgggcagaccagtggaggccaccctactgtgttatctgcgccttcgatgaagtgagacccttggggagaacgggctgtggatgaaggagtggactgcagccttggcctagccactgggctgggatcttctgggtcatgtgactgtgtatccaggagcagaaacttgtattctcaggattcaggatctacccagcaccaaagatgtattttcaggagaacagacctagaaatgggcctgtctggcatttcagagtcaggcaaagcaggcagggccagggagcttctgtgggtctacacaagaaggttcctgtgagggctatcagttgttgccttctagcttgctggtaactttggcgcctccgccaagccctgccagactcccctggctgtgatggcattctgtgccatcctccttgtccccagcctctgcaggatgccctccctacccacctctccctgggccttccctgtccactgggctggattcatgttcaaaccactggactggcagggcaacgacttcttcccacctcaagatgaggtcctcgcccccttgtcttggcataaaaacacctttaaagcatgagccatgtgcttctttgcccttctctgtcctgttccaatcttctgcctcccagtcactccctggggactatgggatcactgtccccccacctgtgtggccacaccatatgtcctgtcaatccagaactgcctctgagctccaggctgaccacagatcagccacagcctgatgcctgcagccccactttgctcacccttcccctcccctcctccttccttccacacagcaagcctacctttctccatccatgctcaccatagcccccttccttgtgacctggaccctccattgtacctggctgagactgtcagcctcctggaggagtggggtccaccttcttcttgccctatgcagtgcaagctcacttctcacccagcaaggttgactcatctgcctccatgtctctggggctttgctgttgccctgaaacctagctgggctggtcttgctcccagcttgcttccccctcctcggatgtccctttgcaggcccctgtcgttcctccggcaccagtgtccttggctgccatggcaagctcatcaggggcttgtaccctggtcaccaagcatggtagcagctgcctgcattgtatctccatctggtcactgcaggtgccaacccttcatcccccatgttttcctgggccatggagggctgacctccgtttctggggaatgtggctgagctgtggtaaccagctacaccccaggtgctctttccatggtggtgcctgctcatcttgctgatgcaaactaggaagttaggctgcatctcggagtggctttcgctggagaggtgctttgctgtctctcagactcagtcactgtgttccctccccgcctctcttatctccatggctgtttgcagctctcccaggtactttggggtctgagctggaattcctttgtggtttgctcttctgcttctcactcttgtattaagaaggattccacaaagggagagtggcatccctgctgctgctgtgccagaccagagtttcctgaggggccctgaccctaaccctccagctcagccctgtacacctgaccctgtaaatgagtggggtttgctgactgtaatccctgacaccagtaaaaccaaaaggactcttgggggctcagtgtgagagccagggttacctactctgccaagtgaggacaaactgctaggctgtatcccataatttcaggatgagaaacattaacaataaaaatttgtagtaaacataacctcatgaagaactaaaaaaaaaaaaaaaaa

SEQ ID NO: 406 - DNA, 1639 bp, HOMO SAPIENS
atcatctatatgttaaatatccgtgccgatctgtcttgaaggagaaatatatcgcttgttttgttttttatagtatacaaaaggagtgaaaagccaagaggacgaagtctttttctttttcttctgtgggagaacttaatgctgcatttatcgttaacctaacaccccaacataaagacaaaaggaagaaaaggaggaaggaaggaaaaggtgattcgcgaagagagtgatcatgtcagggcggcccagaaccacctcctttgcggagagctgcaagccggtgcagcagccttcagcttttggcagcatgaaagttagcagagacaaggacggcagcaaggtgacaacagtggtggcaactcctgggcagggtccagacaggccacaagaagtcagctatacagacactaaagtgattggaaatggatcatttggtgtggtatatcaagccaaactttgtgattcaggagaactggtcgccatcaagaaagtattgcaggacaagagatttaagaatcgagagctccagatcatgagaaagctagatcactgtaacatagtccgattgcgttatttcttctactccagtggtgagaagaaagatgaggtctatcttaatctggtgctggactatgttccggaaacagtatacagagttgccagacactatagtcgagccaaacagacgctccctgtgatttatgtcaagttgtatatgtatcagctgttccgaagtttagcctatatccattcctttggaatctgccatcgggatattaaaccgcagaacctcttgttggatcctgatactgctgtattaaaactctgtgactttggaagtgcaaagcagctggtccgaggagaacccaatgtttcgtatatctgttctcggtactatagggcaccagagttgatctttggagccactgattatacctctagtatagatgtatggtctgctggctgtgtgttggctgagctgttactaggacaaccaatatttccaggggatagtggtgtggatcagttggtagaaataatcaaggtcctgggaactccaacaagggagcaaatcagagaaatgaacccaaactacacagaatttaaattccctcaaattaaggcacatccttggactaaggattcgtcaggaacaggacatttcacctcaggagtgcgggtcttccgaccccgaactccaccggaggcaattgcactgtgtagccgtctgctggagtatacaccaactgcccgactaacaccactggaagcttgtgcacattcattttttgatgaattacgggacccaaatgtcaaactaccaaatgggcgagacacacctgcactcttcaacttcaccactcaagaactgtcaagtaatccacctctggctaccatccttattcctcctcatgctcggattcaagcagctgcttcaacccccacaaatgccacagcagcgtcagatgctaatactggagaccgtggacagaccaataatgctgcttctgcatcagcttccaactccacctgaacagtcccgagcagccagctgcacaggaaaaaccaccagttacttgagtgtcactcagcaacactggtcacgtttggaaagaatattaaaaaaaaaaaaaaaaaa

SEQ ID NO: 407 - DNA, 2753 bp, HOMO SAPIENS
gagcgcagagcggtttggtcgttcgttgggcggtgctggtttttcgctcgtcgactgcggctcttcctcgggcagcggaagcggcgcggcggtcggagaagtggcctaaaacttcggcgttgggtgaaagaaaatggcccgaaccaagcagactgctcgtaagtccaccggtgggaaagccccccgcaaacagctggccacgaaagccgccaggaaaagcgctccctctaccggcggggtgaagaagcctcatcgctacaggcccgggaccgtggcgcttcgagagattcgtcgttatcagaagtcgaccgagctgctcatccggaagctgcccttccagaggttggtgagggagatcgcgcaggatttcaaaaccgacctgaggtttcagagcgcagccatcggtgcgctgcaggaggctagcgaagcgtacctggtgggtctgttcgaagataccaacctgtgtgccatccacgctaagagagtcaccatcatgcccaaagacatccagttggctcgccggatacggggagagagagcttaagtgaaggcagtttttatggcgttttgtagtaaattctgtaaaatactttggtttaatttgtgactttttttgtaagaaattgtttataatatgttgcatttgtacttaagtcattccatctttcactcaggatgaatgcgaaaagtgactgttcacagacctcagtgatgtgagcactgttgctcaggagtgacaagttgctaatatgcagaagggatgggtgatacttcttgcttctcatgatgcatgtttctgtatgttaatgacttgttgggtagctattaaggtactagagttgataaatgtgtacagggtccttttgcaataaaactggttatgacttgatccaagtgtttaacaattggggctgttaagtctgaccatacatcactgtgatagaatgtgggctttttcaagggtgaagatacaagtcttaaccacagtgtaacttacagtttcctttaaaaaaaaaaaaagtaaacctggcagctatagaatacactatgtgcatttataatagctattttatatattgtagtatcaacatttttaaattaaatgttttacattcacaagtggtggggagtcttgtcattaaggtgtgtgtaatttagagtccagttggttttcttctgactgcacttgttctcatagtagtaaaatgctatgcgcatttataccttgcataagtcctcattctaccacatgttaaccctctagctgataatgcaaacactaactgggggattttatttataagggctctagaaaaaacgagttattcacaccagcatcatcttaactaacattctgaactagttagtgcagcttttcattgtgttgtgtggttggtctcataactaggttgagtttttctcctctgctgaggaaacagtaccgaagttctttttcttgtggcatttgtattataaaaacttggtgtgggggaggagcacaaaactccagcccactgaacctctgccaattaagatggtgttgggttaggttacatctggttactgtcctgggaaaatcatttttatagagatggccttccaagtggttttaaaatttactgaagtttttaggtcaattatgtatgttgactaaatttacaaataaacttgtttatccaactaagtgtccaaaacctaaattgaatgtactaagttttcacatgtcccattatctaggtccttgtatactaatgttttgaacttagatcatttcaggtgttgtttggtggataaaggaaccttttatttataaagatactgtagaaagcatgtgaacagctctctgcttgattaagatgccataatagtgctgtatttgcagtgtgggctaagacaaagtatattaataagcttttcagcccccccactcccgttccgtagtgtagaagcccacaggtgtagaactcagtcttaaacttcagtatgaaaccagtttccttgtgcgatgatggccactaaagcatagtacgtggatgtcagtgagacagcatgagagccagcagtcatcaaagcgttccacgtttgaagttagcaactgcttaaagttatgccctattaaaattgctttctcaaaagtttgggttagtttcaaatgtgatattttggagggaaggtaaagtaggtatctttcaggtcgtgataatgagctcctatgaaaggatgcaatataatgacccgcttttctagaaagttcataatcagctctggaacaagcacacttgattcctcactgtgcttcagaatgagattaagatcagatgttggaacgtgctatgctgtagcgtgtctggaaacaaagtacacaaacctggctacggtgatgagttagcttctgcttactacctgtgacaacccaagtgggtgacactagtgaaccttctccagtctgcaggctggcatagaaggctcttagattatattgggcagcttgcaatctgccgaagcagtgacttgcatttccacacttggcttgagcactcaacccagaaggcgaagatagcttttggttgtaggcggcttcctgtatgggatatccctcggtaagggtaaaggagcagaggcaaaggagaaaagcagaagttgcagctgatgcaggtatcctatgcccttgatggatgagactaaaataaaatttttgaagttaaaaaaaaaaaaaaaaaaaaaaaaaaaaaaaaaaaaaaaaaaaaaaaaaa

SEQ ID NO: 408 - DNA, 2259 bp, HOMO SAPIENS
cgacgtggcgcgcgcgaccccttcgtcctgcccctcctcctcgggtcccgtcggcctgcgcgcgcccgggagtttgaatttcctcggatttggagcaatatcgcagtggaaggcgctgtgggttgaggtcgccgcccacctctcctaggggaactatggagctggcagctgaaagactcagtgaagcaacgaggatgccggggagagggaaggggctgggctctgggcggtgccaagtctgtgagggggcgcggtcaccgcccagggttcccacgaacgccaaggcggccacgtcctgctccccctggtgaagaagctgccctgggcttgtcgtcctagggtctccagacatgtctgaggtgaagagccggaagaagtcggggcccaagggagcccctgctgcggagcccgggaagcggagcgagggcgggaagacccccgtggcccggagcagcggaggcgggggctgggcagacccccgaacgtgcctgagcctgctgtcgctggggacgtgcctgggcctggcctggtttgtatttcagcagtcagaaaaatttgcaaaggtggaaaaccaataccagttactgaaactagaaaccaatgaattccaacaacttcaaagtaaaatcagtttaatttcagaaaagcttgagtctactgaaagcatcctgcaggaagctacatcatccatgtctttgatgacccagtttgagcaggaagtatccaacctccaagatatcatgcatgacattcaaaataatgaagaggtgctcactcaaaggatgcaaagccttaatgagaaatttcagaatattacggatttctggaagagaagcctagaagaaatgaacattaatacagacattttcaaatcagaagcaaaacatatacattctcaagtaactgtccaaattaactcagctgagcaggaaataaaattgctcactgaacggctaaaagatttggaagatagcacactaagaaatattagaacagtaaaaagacaagaagaagaagatctcctgcgagtagaggagcagctaggctctgatacaaaggcaattgaaaagttagaagaggaacagcatgccctctttgccagagatgaagatctgactaataaactttccgactacgaacccaaagttgaagaatgcaagacacatttgccaacaattgaaagtgctattcactctgttctcagagtctctcaggatctgatagaaacagaaaagaaaatggaagacttgactatgcagatgtttaatatggaagatgatatgctgaaagcagtgtctgaaataatggagatgcagaaaacccttgaaggaattcagtatgataatagcatattaaagatgcaaaatgaactggatattctaaaagaaaaagttcatgattttatagcatactcaagtacaggagaaaagggaactttaaaagaatataatatagaaaataaaggaattggtggtgatttttaaattcatgacatttattctgatgaaccatatcattatacataaattgattagtccattgattttgagttactttgatacgcctcatcttatcctacattattggaaaataaatgagatgtccacacaaatggattatccacataatcaaagcttatctttttaagcactaaaacttacttcattgtaactatttgaaatagaaatagttctttaaaaatatttctctacttttaaaacaagatacttaatatttttaatgttttttaaagcattaatgaacatcatcattaatttcacctattatattgtacccacatatattgatgtctccaggggctaataaagagtatttaccacttcactaaatgaccccaatttgccattttcaaacctatgtctcataccttttctgtcacctgaacttactgtcaggttggttggtaatgtgcctgcctcagccagttcactttcttaggtaattcactgcaggttaagaatccacacaaccaagttcatgggaattttgtgtaaaataaaagataacatgcctgagggagagcctggtgcctttgctatgaattaatatgcactttctgaaaactctaaagcctgggaaacattttagtttttgttaaggttctaaactgtgttacagatacttgtaagacttttaaaatcagagtaagtatgttcttacataaggcctttcttaggaattatgtgtatataaatctttgaaatatctttatatacctgagttttaggttccaactgt

SEQ ID NO: 409 - DNA, 1750 bp, HOMO SAPIENS
atgcttgttttgaaatccaaggcaaaaaacaattgcaagcgcccttacttccgtgttgcttcatactcctcttgcgcctgcgctgtctccttggagcagaggcggggccaacaagcctgttttagaaaccctccagtccttagctcgtttagaacacaagactccaagcttattggagggctatcttgccttacggctccaagccgctttttacggcgtttttcagctcgccattcacttcgctgtgaagatggcgtcgggcagcgggacaaaaaacttggactttcgccgaaagtgggacaaagatgaatatgagaaactcgccgagaagaggctcacggaagagagagaaaagaaagatggaaaaccagtgcagcctgtcaagcgagagcttttacggcatagggactacaaggtggacttggaatccaagcttgggaagacaattgtcattaccaagacaacccctcaatctgagatgggaggatattactgcaatgtctgtgactgtgtggtgaaggactccatcaactttctggatcacattaatggaaagaaacatcagagaaacctgggcatgtctatgcgtgtggaacgttccaccctggatcaggtgaagaaacgttttgaggtcaacaagaagaagatggaagagaagcagaaggattatgattttgaggaaaggatgaaggagctcagagaagaggaggaaaaggccaaagcgtacaagaaagagaaacagaaggagaagaaaaggagggctgaggaggacttgacatttgaggaggacgatgagatggcagctgtgatgggcttctctggctttggttccaccaagaagagttactgaggctttctgtgcttggcctgactttggcctatgctggacctaactttgcgtgtgtgtgtgtgtagtagggggtcatttctttttgggtaatgggaaagttcttaagagtgtcaatggggagggatagagggtgggggctcatggtttccctctactttgggagagggcacagattgcagaggtaatgctgtggcatattgcttctgcctcagtgtatcactggagtcacaggaccctgcccacctgagttcccaataaagaaaaacctccccttctgaggctgctttcccaaaactccccctgcatctttatctcttcatctatcccacctcttgtctgaacatcccacctttatcctgtgttctgcctttgttttaattttaactcatgttcatcctgcaacagaagcattctctaggtcccagtttccagttgattgcatatccttgatcagccctttttcccatcctgccctatggttctctagccacctgtgcatgcatgtgtatttctgcctggttctatggtgtgtggatgtgtgtgcatgaatctgtcatatagagggggtccgagctggaatcctagagcattgctgccctggggcctgatgttcttggcttcctcagagcatgtaacaggaaattaaatgggatgagtgtttggtgtggtttgtgtctgatgagttttttaacattcaggtgtagattgtttcagcttctcatgtttcattttcctgaagatttatgtttttgtctaccttgtgagcaggcttttggaagaacctgtttgatgcaaaaaagaaaatgaaaaacaaaacaaaaaatccccaaaaccttattatgggagcccgtcggtcttagaagctgtttgacatgtataataaatggcattgactgggcc

SEQ ID NO: 410 - DNA, 1026 bp, HOMO SAPIENS
cggcggccggagggcccaggacagccccgggagggcggcgaggcggagcaggagcgccccggctccggccacattctcagagtcaggaaaaggggcgagaggccacatgtctccctctcgcccaactgaaaacgaaacggcgctccagcagattgggtggaaagagctgggtctcttttctctgtttttcacgctagaaagggcttgtaaacattgttccttttaaaatgacctaccccaggcatttgtttgggcacacttctgtcctggggtcatcgttcctaggtggcttcggacctgggacttttcctgtatctgcacattgtcgttttatacacaattgccaaggtgggactgctttcaactttactgtgcttgaagctgcaaaggttctgccctgatgtttcctggaataatgctgaggactgcctttcgggtagccgccctattcagttcacttcatctcggaaatacctgacccctgccttggatccagcggccctcctgagagctgaggaaggaggaaatcctatgtgtctgctcccggagctgccacaacccatcttcccacaacttggaacttggaaaaaggaacccaggacacgactttgcttttcttttggacctagttggtgattatactctgtctcccatggagaccacgtcttgcatccttccttctatatgggatttaggatagaaattaaaaagaaaacatattattttgagtcttgatttggagaaaggtagtattcaggaggaagtaggctatgatacacatagaaaatttgaggacagtgttacttaacaaggacatttctgtctctgcagaagtcacagcttggaggaaaccagtttgcactatttgatgaggaatttggccaccaaaccactgatactttcccaaaggtttggcagaaattgttttttgagtggctcaccagagtacccagaagaatcagtatggaattagaggacagtggcctaccctaaataaagacatgagtgatgtaaaaaaaaaaaaaa

SEQ ID NO: 411 - DNA, 1928 bp, HOMO SAPIENS
ggcaataccaggtgatgctggggtgatgctgatgcccttccaaggttgagacctagtctctactctgatgtcagctctccgagagacactctggcctgctttgttcccttccctgtccccagtgtctggcatcgagtaggctgccataaatatctctggagtgcatagtaacagtgatgatgataatagcagctagccattgattgaagacctcttgtgtgccggtctctgcgttaaacatttctggaggcttaactcatttaaggagctaccccagccatcattttctcagatggtgaaactgaggttcagagaggccaagcgccgtacccaaaggtcactcagcgggagagctggcaggaaacctcgcgtctgccggtgccggcgccgcccctgcccctccccggagcccggcggccgcgcgtgtccgcggccctgcgagggctccccggctccggacagcccagggcggccgggggaggagtgcgctgcgacggccgtggcgaaagtgcggttgtggatgcgcggagaggccggcagcggtggcagcggcagcggaggaggaagctgagcagggcggcggcggcggtggaacctgcggggctggggcgcgcgccatgggccgcctgcactgcactgaggacccggtgccggaggccgtgggcggcgacatgcagcagctgaaccagctgggcgcgcagcagttctcagccctgacagaggtgcttttccacttcctaactgagccaaaagaggtggaaagatttctggctcagctctctgaatttgccaccaccaatcagatcagtcttggctccctcagaagcatcgtgaaaagcctccttctggttccaaatggtgctttgaagaagagtctcacagccaagcaggtccaggcggatttcataactctgggtcttagtgaggagaaagccacttacttttctgaaaagtggaagcagaatgctcccacccttgctcgatgggccataggtcagactctgatgattaaccagctcatagatatggagtggaaatttggagtgacatctgggagcagcgaattggagaaagtgggaagtatatttttacaactaaagttggtggttaagaaaggaaatcaaaccgaaaatgtgtatatagaattaaccttgcctcagttctacagcttcctgcacgagatggagcgagtcagaaccagcatggagtgtttctgctgatttctgtccctgcatctcccctggccccgttccctgccctcctcccttccctgggtgactgctctgagaggcacttcactcacaggcctgtgggatgctccatggggccctgctggctccatggggcccaggtgcaaagggtttctgaaaaacagcaggattaagtactgaaagagcccaacacaattaccctgtaaactctctgttagggcaaccaccaccacctgtcttccaggacacatttttagatactctgacaggccactgcatctcagattcaggggagaaaataagttgtcacctccccttcaaagttccagagtaaacaaatggtgccatcattcaagataacatgctgatcaccctcctcccaaaaagcaagagcttgtttatggctgaggaatcggcggattgtctgaatgacacatatacagagcccccacggatttctgcacactctgggtctgtgctggtggaacattgccaatcagttcttaatgaggcacctgtgtgtaaatacatgcttggtcttctctgcagagaactgaggctaaactctgtccctacttctggttttgccctgtcatgtcgtaacgaggtgggccttttgaggccattttagtttgagttcgagccaaccacctctgttggttagatgatgaataaaaaggttctgaagaaaaggtctggaaaaaaaaaaaaaaaaaa

SEQ ID NO: 412 - DNA, 1016 bp, HOMO SAPIENS
ggtaaacaggctctgtatccgtggcagcggccgtggcaggctggctgggtaccggctgtcgctgacccaggagaagctgcctgtctacatcagcctgggctgcagcgcgctgccgccgcggggccggcagccatggccaaggacatcctgggtgaagcagggctacactttgatgaactgaacaagctgagggtgttggacccagaggttacccagcagaccatagagctgaaggaagagtgcaaagactttgtggacaaaattggccagtttcagaaaatagttggtggtttaattgagcttgttgatcaacttgcaaaagaagcagaaaatgaaaagatgaagagtcttgctgtgtcacccaggctggagtgcactggtgcaatctcggctcactgcaagctctgcctctcagattcaagcgattctcccacctcaccctcccgagtaggtgggactacaggccatcggtgctcggaacttgctcaaatctatagcaaagcagagagaagctcaacagcagcaacttcaagccctaatagcagaaaagaaaatgcagctagaaaggtatcgggttgaatatgaagctttgtgtaaagtagaagcagaacaaaatgaatttattgaccaatttatttttcagaaatgaactgaaaatttcgcttttatagtaggaaggcaaaacaaaaaaaagcctctcaaaaccaaaaaaacctctgtagcattccagcggcttgaccaatgacctatgtcacaagaggtggcgtgtaaggaatgcagccccctgaagacagcactacaagtctgggggagccagttttaacatcagtgcacagctgctgctggtggccctgcagtgtacgttctcacctcttatgcttagttggaactaagcagtttgtaaactttcatccttttttttgtaaattcacaaagctttggaaggagaagcaataaatttttgttttcaaatgaaaaaaaaaaaaaaaaaaaaaaaaaaaaaaaaaaaaaaaaaa

SEQ ID NO: 413 - DNA, 2698 bp, HOMO SAPIENS
ggttccgtttccggagtggagggcacgccagggtgtctgaagctgagaccccgggctcgcagtcgccccatgaatttcgagttccgcaactgacgctactgggcggggcttcatggccagggcctcgctcaggcctaagtttccccacctgtgctcaatgcacaggtgcggtgccgcctccagggccggccgagaagagaggccgcacccgcacggggactgcatctcccagagcgccccgcgagcggccgagcggcgggactccatgccctagagtgccccgcgggcggccgggcggcgggactccatgtcctagagtgccccgcgggcggccgggcggcgggactccatgtcctagagtgccccgcgggcggccgggcggcgggactccatgtcctagagtgccccgcgggcggccgggcggcggccgccgcaaccgacaggtccgggactgggcgctgcggcctcgtccgcgcgccggggcgggggcctagctcgacagcttcccggcggctgcgcgatggacagccccgaggtgaccttcactctcgcctatctggtgttcgccgtgtgcttcgtgttcacgcccaacgagttccacgcggcggggctcacggtgcagaacctgctgtcgggctggctgggcagcgaggacgccgccttcgtgcccttccacttgcgccgcacggccgccacgctgttgtgccactcgctgctgccgctcggctactatgtgggcatgtgccttgcggcttcagaaaagcggctccacgccctcagccaggcccctgaggcctggcggctcttcctgctgctggccgtgaccctcccctccatcgcctgcatcctgatctactactggtcccgtgaccggtgggcctgccacccactggcgcgcaccctggccctctacgccctcccacagtctggctggcaggctgttgcctcctctgtcaacactgagttccggcggattgacaagtttgccaccggtgcaccaggtgcccgtgtgattgtgacagacacgtgggtgatgaaggtaaccacctaccgagtgcacgtggcccagcagcaggacgtgcacctgactgtgacggagtctcggcagcatgagctctcgccagactcgaacttgcccgtgcagctcctcaccatccgtgtggccagcaccaaccctgctgtgcaggcctttgacatctggagctggaggcctgcataggctgcatgcagacacgtgccagcgtgaagctggtgaagacctgccaggaggcagccacaggcgagtgccagcagtgttactgccgccccatgtggtgcctcacctgcatgggcaagtggttcgccagccgccaggaccccctgcgccctgacacctggctggccagccgcgtgccctgccccacctgccgcgcacgcttctgcatcctggatgtgtgcaccgtgcgctgagtgggctggggccttgaggtgactctgtgtctccccccaaagccacagggcagggaagggggtggctgggcctcctggctggcaaagggctctacttaaagcacatgatgtagagcaactcgcctctgccctgggtctgcagaaggctgaggacttttggttaaaagcaatcctcatgaaaacaccccaccctgcttggcagccagggtacaagtcctgggcacctcctctttgcctccctcctgcccctttcctgctggtgggggcagatcctgcacacacagacacagcgtctgcccccgagccattccctggagaccctgggtctaccccaggtggtcgtcatctgggccatttgccttacttctctggagcatacccaccctcagttacgtgccagacctggaccgcattctcctgccctgtcctggagctggcccctggctgcctggaggaccctgggtaggtcctgagggtgggatggagaagagggcactgctgtggtgtgggagcagtcctggggcttcctggtggctgtgaccagttgaggggctgttcctgggtggggtggcaatgggaggacaggtcagagcgccctcatttgtggggctgcccctccgggtttctcatcctgtccttggtgcctttttctgcccaacaagtccagggaaggccgaggtctcagactcctgggtaggggtgggggtttgagttgaggaccaaagtgccatagcgacatccagaacacaagcccaccaggggtccagcccaggctacccactcccctagggtctcccaggctcagaaggggatgcacgccccctgtggtcaagcctctggtgggcgtcttgcccagttcctgatggttcaaggggaggggggatgttggccaggccccagggcacagccctgacacaggtgtggctactggaggggccttcatacctgcggccccaaagcccctgggcttggctgtttgaggcagaggtgatggactccgggggcctgacacttgggatttgggaggcttcctagagcgctcagcaggtgaaggcagcaggggccatggccgggagccaggcctagctttgaactgagtttcaagggctgccaaagaggggcagtgggttggggttgtttttactacaaaataagttacttagttttataaagacaaaccgattgtagccaaatgacaccatatttaataaaatttagtctgaagtgaaaaaaaaaaaaaaaaaaaaaa

SEQ ID NO: 414 - DNA, 3432 bp, HOMO SAPIENS
cgggtgtgatcgagtggcctcgcctcatcgcctagcgcccccctcagtcgccgccgcctccgcccgccggccatgtcccccggccgccgccgccgccgcccgagcgcggcgctcccgcggccccgcgcgcagtgagcgcgggcccgtcttgccgttcgcccgccccagggcccccttgttctccgcgccgccgccgccgccatgttgggtttggagctgcagcggagccgccgccgccgccgcgggtgagggaggccgagagcggagcccgccccgccccggggcccagggagcggggccgcctcggagcccggcctctccccgccagccgccttcccggcccgccgtgcagccagcgagccagcgagcgagcaagcaagcaagcaccggaccccggccgcgccttcagctacggcccgagcgagcccgccgccgccgggcccggccacagcctgcagcggagcccacgagaggcagcgccatggcggagcagacctactcgtgggcctattccctggtggattccagtcaagtgtctacatttctgatttccattcttcttatagtctatggtagtttcaggtcccttaatatggactttgaaaatcaagataaggagaaagacagtaatagttcttctgggtctttcaatggcaacagcaccaataatagcatccaaacaattgactctacccaggctctgttccttccaattggagcatctgtctctcttttagtaatgttcttcttctttgactcagttcaagtagtttttacaatatgtacagcagttcttgcaacgatagcttttgcttttcttctcctcccgatgtgccagtatttaacaagaccctgctcacctcagaacaagatttcctttggttgctgtggacgtttcactgctgctgagttgctgtcattctctctgtctgtcatgctcgtcctcatctgggttctcactggccattggcttctcatggatgcactggccatgggcctctgtgtcgccatgatcgcctttgtccgcctgccgagcctcaaggtctcctgcctgcttctctcagggcttctcatctatgatgtcttttgggtatttttctcagcctacatcttcaatagcaacgtcatggtgaaggtggccactcagccggctgacaatccccttgacgttctatcccggaagctccacctggggcccaatgttgggcgtgatgttcctcgcctgtctctgcctggaaaactggtcttcccaagctccactggcagccacttctccatgttgggcatcggagacatcgttatgcctggtctcctactatgctttgtccttcgctatgacaactacaaaaagcaagccagtggggactcctgtggggcccctggacctgccaacatctccgggcgcatgcagaaggtctcctactttcactgcaccctcatcggatactttgtaggcctgctcactgctactgtggcgtctcgcattcaccgggccgcccagcccgcccttctctatttggtgccatttactttattgccactcctcacgatggcctatttaaagggcgacctccggcggatgtggtctgagcctttccactccaagtccagcagctcccgattcctggaagtatgatggatcacgtggaaagtgaccagatggccgtcatagtccttttctctcaactcatggtttgtttcctcttagagctggcctggtactcagaaatgtacctgtgtttaaggaactgccgtgtgactggatttggcatttaaagggagctcgtttgcaggagagaggtgctggagccctgtttggttccttctcttcctgcggatgtagaggtggggccccttccaagagggacaggcctctccccagcgcgccttcctcccacgtttttatggatctgcaccagactgttaccttctgggggagatggagatttgactgtttaaaaactgaaaacagcgaggagtctttctagaacttttgaacactaaaaggatgaaaaaaattagcaaaccgaagtttcttcaatgacccctcgagaactttgggaccagtttcctataggggactcagtttcagagaactgagacagaagctcttctgtcgttatattcttctttcctttttttggatttattaaatattttctgtggtgtgaagtgacttattaaatccacagacattgagtgacttcttacaacatccacataagaatttgttgtaatgagttcatgtccacccagatgttgtgttggcagtgaacaagggcacggtttttatacatacgtacatatatatatataaacacacacatagatatatatgaataaacaaaaatgaaatcctgctaagatcacgctgtgtagctgacaggggcttgctgtcgttttgagcatgtcgagcagtttactgtggcttccttgtatatggataagctgctgtccttccccttcacaactgaccccgcagttacaaactagtatagcatttgtgctgattgatgatagactcatggacttcaggagcccttacttggttttgatcagtgtagcaaattagggatgaagagttcaaaccttttggccctttctttcttttctaggcttctccctcgcagggtgttccgtagtttcttctcgagccaatgcatgtattatagcagcaggtgtctttgtgctttctcatcatagtaacgtactacttgtaaatacatttttctattttctatttttttgtatttttttttttgacattttgtttcattggtgtgctgtatattttccatgccctcactcctttaagaaaaaaaaaaaggaaaaaagcaacacaatcctgtccttgctgttgtgattatagtcttggtttacctgtggtgacaaccgggtgttggggacacatgtcaaatgcccctctgagatgggccctaaattccagtaactggggaaagaaccagctgctgtgtcctgagagcctggccctgtgctgtggtctctgctgcaagcccagatttctgggagtaactagtgttaggtctgctgacctttacctaagcagcccctgcctggtaagaaggtgcccattgttcagaggcaaagagaagcctgcggttggcatgaggatgcctgacaacaaaggctggagaagggccctgagttccagcctctccccaagggtccccgccccagtggctgcctctgtcttgacctgtgtaatgaattagtgtgctgtgtcactgtggcttgaagtcactgtggatcgagctcacagggggcacccatcctgttgtcaacagagtctgaagcagtcagggtgttggattcctctgttgttgtcatcaattcctgctgaggggtttctggggttttgtttttaataaatgactcctttgtaaaaaaaaaaaaaaaaaaaaaaaaaaaaaa

SEQ ID NO: 415 - DNA, 8504 bp, HOMO SAPIENS
agataaggaattgtataggaggaaacttcatagtaaacattgaacctctgtgcttgtctccttgttgaagttgggggttcatgtttattgttccaagggagcctcatcaaaaccacttttaaagcattgagaatccaaataaataccatggatcatacaggattggggataagtcttgaggtctccccgagaaggagaagttctttaatttggtaattttagggtaatggttggatgctctctggattaatggaaaccttcaggggtacttttaggcagagtataacccagtgaagagagcattattatatggtggaatgcgagagtctcagcctgaagcagaaattcctctccaagacaccactgcagaagcattcacaatgctactcaaatatatctacactgggcgggcaacgctgacagatgagaaggaggaggtgctgctggactttttgagcctggctcataaatatggatttccagagctagaggattctacctctgagtatctctgcaccatacttaacattcagaatgtctgcatgacttttgatgttgccagtctctactcacttcccaagttaacttgtatgtgctgcatgtttatggataggaatgctcaggaagtcctctcaagtgaaggtttcctctccctttctaagacagcacttttaaacatcgtgttaagagactcatttgcagctcccgaaaaagatattttcctagccttattaaactggtgtaagcacaattcaaaggagaatcatgctgaaatcatgcaggctgtgcgtttacctctcatgagcctcacagagcttctgaatgttgtgaggccttcaggactgctgtctcctgatgccatcctggatgccattaaagtgcgatctgagagccgggatatggacctcaattatagaggcatgctcataccagaagaaaacattgcaactatgaagtatggagcccaagttgtaaagggggagctgaaatcagccttattagatggtgatactcaaaattatgatttggatcatggattttcaaggcacccaattgatgatgactgccgttccggcatcgagattaagctaggtcagccatccattatcaatcacatacggatactcttgtgggaccgagatagccggtcttactcatacttcattgaagtgtcaatggatgaacttgattgggtcagagtgatagatcattcacaatatctgtgtcgttcttggcagaaattatattttccagcccgtgtctgcaggtatattcgaattgttgggactcacaacacagtgaacaagatttttcacattgtggcttttgaatgtatgtttacaaacaaaaccttcactcttgagaaggggctgatagttcccatggagaatgttgcaacaattgctgattgtgccagtgtgattgaaggagtcagtcggagccgaaatgccttgctgaatggggacactaagaattatgactgggattctggctacacatgtcaccagctaggaagtggtgcgattgtggttcagttggcacaaccgtacatgattgggtcaatacggttactactttgggattgtgatgatcgaagctatagctactacgttgaggtttctaccaaccagcaacagtggaccatggttgctgacagaactaaagtctcctgcaagtcctggcagtcagtaacttttgaaaggcagcctgcctccttcatccgtatcgttgggacacacaacacagcaaatgaggtgttccactgtgtccactttgagtgtccagagcagcagagcagccagaaggaggaaaatagtgaggaatcggggacaggggacaccagcctggccggtcagcagctcgactcccatgcgctgcgggcgcctagtggcagctcactaccctccagcccaggctccaactcacgctcccccaaccggcagcaccaataaaggaggcagcgggcctggtgtgacttggtgggctcgggcaacggcaggaaacggtctcctccctgagcaggggtctctgttgactgcccccacctctgcccctttccagggaggagccgacctagctgcaaaagcagacaccgaacaggttttctcccaaggacagaaaggggctgctttgttcttctcaatttatccaaatcaggcaggtctcaagggggagaaaatgggtcttcaatcttcatcaagtccaccattaacaccctacctctctaatctagcccaggcgcagggaacaggaggaagtcatagacaggcctgtgttggaatacaaaaatggcacgcaaacactcaggcggaggagaaagccattgggcctttgctacctggaggcaccctttaggaatgggcctccatagagtgttcattctgctggaatacattgccctggcaactaaatgattttttatttgttttagttattctccactcagtgaatcataggtgttccggatctatttgaaatgctcaaacagcaaatcactagttttaatcccttttgatgctataattttccttccttggttttgaacggttcagcttgcggggacagagacccatcgtgcatgtctcctaaatgagacacggatgcagctcatcctggcacttgggccacagaggaagtgccacaaatgcacacaagcaaatcaacctgtggacactggagttaatagtcactcgtgtggctgagttactcacctgtcattcctgacatggatccagcctttaagcttgggaggctgacaaggaaatagttactatgcccgctgctaattcactgttccgaagtccatgtagataaacatataccgagttctggcgtggccaaacctgccggggactgccgtggcttagctgcccctccagttgtgtttatcgaagcattggagaggcagccacctgcccatcagcgtcaggaacgcagaactgggactccgtgcttcccccacaccacagtactcaactggggactgaaaaatagcagttccaagaagcttttctcctaatcctcatcaaaaggacctcatttgacgatggtggcttgatgtggctccgtctcctacttagtgatttccattccagtgctgcctgccctgggtaactgcgcacaacattgcctgcccctccgctgtccccagagctccggcctctgtcgccatcagcatcagcctgggagtctccccaggacggcatggcacgtgagcagcactgcagtccttgggtcttcggcgccaacctgcaaccctgatcaaaggagggtgagggcgtgggagtttcctttcaggtgtgtcaaagacatatcagctgcgctctagaaagagccaacgggtcagccgcttcctcctagtttaacttgattttgagtgatttgtccatatggaaatagtagggtagcatcaaactgcgtgattaaattggaagactgtctttccgtgtgaacacaggatggcagacatcagagggctaccggggcagggtggacacgttcctgaggagaagccagggtctgcagctctccatcctccccggtagctccagctgcagggctgagctgcttcctatcccctcagctctgatctctgccacttccctgttgtgtgggagagtggaacactcctgggatgccaggcatttcataatgggaggaggctcctgtaaggaacggtgggcgcccgctcacagtggggggccctccagcatggttgctgactctgtcagcccccagccccgggttgccaattagccagagagctcctgcacacacagcacttccttccccagtgtgttttctacccagatggggacaaaggagccagacagtcatatcaagggcagagttcaaacattttgaaatgagccattcacatgcttctttttaaacatgggcatcacctgcccagaggcccttggcctgaagcagcatgctgctgaccttgggaagagagggtgggctggtgggggtgctggaggagctgcccggccctgcatctgcaaccctccagtcccctgcccacagagcacgcagagccctcctgtgctccgggaacgagatagcagcttggcagctcggcctcgcatctgaaaaggaatacgctgcaaagcctcggccctagacccacatctgcagctccctggcctgtggcggttctttccttcggggcatgcccttccagatctctgtccctcctgtcttctagcactttaaagatgccccttatcatcagataaagagaagtatggggacgatggggtggcactaacagtagatgtcattggtgaggactgatggcaaagtctcattccctcacagccgcgctgccagctcgcctccccctcgctttgctgggagcctgccctggactccaaaaggacacgggttcacctcctttcccaggctggaggggtactgcccttccctgaggggccttctgactggggcaggaactcttttcgtgtgtccagctgggcctggaggccaagtcaaggtgtgtcacaccacacaccagggcaaggacctcatctccagggaacagggacaagtgagtggctaccagaaagtccccgggcagcctggagttccccagagcctggctggtcctacagagcacttctcccctgggccaccaggaccaaagcgacctaaacacttgaagctaaaagcaagtgctgatgatgggatgggctggcacgtggctgggagggctcctgggcaccacagagccctcagcccagcagagagtggaggctcagtccgtggggagcgggggttgtgaaggagacatggccaagcccctggtcggggagataagctcccccatgcccaggccagccccaggggcaacaagccaacatggagagaggtggcaggtgaggctgacaggtgggtgcctgtggcctgggcccatgagggcaatggtcctcagtaaccaatggaaaggacacaagggcgccatggtcaccaccacccaggcaaagaaatgggaggtggccagcacccccacccttcacttttcattattattattattattattattattattttttttttttttttttttttttttttttttttttgagagtagaaaggcaacttcattggagcttttggggaaaaaagccttcaaagtcaccttctggcagctctggggagggtcatttggggtggactgagagtgtagggcaggtagggtgtgtgctgggcagcagctgtgtccatgcagccagcacccagcagggcagtctcacaggagccgttgtgagcactttggacttgaagcagctatgaaccaccccccgcccccaccgtctctccctctcacacacacacacacacacacacacacacacacacacacacacacacacccgttttaccattttctcagtgctttttctgctttcattcctttgattttagttagaagcacaagccatgatggatgtgggactcttctcaattgctctttaaattgtcactttttaaatcctattaaatgaagtgtcgattcctgacaaatacattaaaagtgttttattcctagaagagttgggaaaagaaattattttcagcaagagtaggatgtttgttaaactgattccttggcaaaaaagagaaaaaaagcttttgaattgtgcaaaaaattgcccagtattatgctgtcgccccagttgtcaaactgctgtgcagatggctccagcccagtcaacttcaccttctttttaatttagaagataacaaaattgtaatcacttatcctttccagagccaagggggaaaaggaaggtataatctacaataaaaagcgagcgttctgtgtactgaggccacttggtgataaagagatggagcgctcccctcacagacttcaattaagaacctccctttggacagggaagaaaggtgtcaaagaggaaaagaaaattaaatttgcttccttccaggagtttttcctcattagtgcttgcttgtcggtgttattattttaatcttaccttctatgtggtgaccagctcctccgagcgatgcccaggtcgggcacggcccgggcagggcaggtctgcagcgatgccgtggcagaggtgggcatactccatttgttttggcagctgcagccattgattctgcatatttttcctgacaacagccccggcaggagttcagttaggaatttaaagtgcagttcatggttctgtgccaccgtggcttttattattataatattaaattagaagttgtcctagtgcctggtgtttgctcagagtttccagaagagagggaagggcaaggtttaaatggcatgcaggacaactggaatgcccccatctctctcgctgacacggatccagtcatacctggggctggacgggatttggaggccctggtcatttgcagagtgaatggtgaagggcgcggaaaaggtttgcttggaggaaagaccggttgcagaggcgaggcggagggaggaggggcggaggcagcaggtctttgtttgtggtaggtctctggcttccatcagggaggaggaaagaggctgtgcccttcctggctcttggctgcaccactgaggacgctccgagggacagcgtgctcacccatcctttgcacagtgctggccccaagccccacggccttccagctaggattttctgctgggctcatgcagaggcaggggacaggtgcatggaagagccgccccacccgacacaccattgtttgaaaatcactgttctctttactcacttaaaaaagtgtacagggaacacctgttcctggcataatgctccaacctcgcggaaggggccaggtgcccttcatctggctctggctgcttccgacctgggcccacgtcatcgttcacgtcctctgtgaccaccactggtcacggtgctccctggcccagcctccaacccacccagcaccctggcatctcccaggccagtctgctgcacccagcgagcttccagtcagaagccaggctgaacggccctcctgccccatcagcttcgtgtcttcttttttttaaagaactgaaatagtccccaagaggcctcatggcctgaagactcacaatcatccacctgtaatttatgataaatgtctgggagcatttaccatttgcgtccgtgagtatttatagccctgaatgggcgggggggagggggggtggaggaggccctgcagccaggagctacacacctgtccccactagtgtcccctggttgacagagccccctcagcctccccaaggctgtcactgcggctgtgacagctgaggagtgccgcctttgaaagccagtggacagtcgctccactagggggagaggccctggccctggcgcagaggaggcgttgcgaggcgggacgggggctggaggggctgagcagccttcagggcagggactgggccctgggtcactggagacgttgatattagtccgtctgctgccaaattgctccccaccacatgagccccaggggtttatgtcccaggaaggcgagggtgcccatctgagcggaattgggaggggacggcaccagctcatctccctcagggcctttgcctcctggtgctgccctggtggctgctcctgcaccacagcccctgatggctgctgctagtcctgagttgctgggtttacccccagcccacacttcccacctgggcctgagggtgcggccagtgccctagtcctagccactacaggagtcattctgagacctgctggaggccatggggtcttcccaggcccctcaatcagctgcttccagggtcagcagggcagggtgctgccagtaaggtcctcagggagcacagcccggccgcccaggctgggggatactggggcagagcttccaggtctgtggggcctgatctctccccaaggctctccaggccttggtgcgccctccacagtgaccttcagagaggctgcaccccctcagaagaacagtgagaaatctctccatcacacgctccctggtccttatgtccctgaggccacccttccccaccccccagtgcctggagaagcgtgagactctggaggggcgccaggaggccaggggtcctcagggctaggcctggagctcggcccaagagctgcttttgcgaagcctgtcttgaatccggattcaccagagaacaagagcctcccagcctttggcgtttctgggcctgtaaagatgtgtgtacctcccaggccactctgatgcaagggcagggaccatgccaggcctgggttgggaatggctctgtgactccagaagctccgtctaaaactccaaagatgcccaaaaggctgtgctgctatgtggaatgtgtattatttgtgagcacgatgcggcttcttcctcattttgcagagcaacctaagcgggcagatgtacaaaccgtgtgttcgaaacccctgagtccatgtgtgtgaaaatgcaggttttctcttagaaataaagtggtgacttgtgctgtaaaaaaaaaaaaaaaaaaa

SEQ ID NO: 416 - DNA, 3078 bp, HOMO SAPIENS
cgccgcggcggcagctgagttgggctgaggtgtccctagctggctctgcggctcttccgggtctgggctcggagattcacaggcggcccgcgaggccgagcgagggacgcatggccctgaggcggccgcagggcttggcggggtccggaggttgacctcgcccccgcagccggccttcgaggctgcctcctccaggcagcctctggggcccgcgcccgcgcctgctcaggctcccgtgttcaggctgcccatcccctccccaccggcgtcccggacgttgggacctgtgaccgtggcctcgggctgggcttccaaagccggccgcagcccggcgacccccgaggcctctcgccccgggcccctagacctctcactatgaccgcggccgccgcctccaactgggggctgatcacgaacatcgtgaacagcatcgtaggggtcagtgtcctcaccatgcccttctgcttcaaacagtgcggcatcgtcctgggggcgctgctcttggtcttctgctcatggatgacgcaccagtcgtgcatgttcttggtgaagtcggccagcctgagcaagcggaggacctacgccggcctggcattccacgcctacgggaaggcaggcaagatgctggtggagaccagcatgatcgggctgatgctgggcacctgcatcgccttctacgtcgtgatcggcgacttggggtccaacttctttgcccggctgttcgggtttcaggtgggcggcaccttccgcatgttcctgctgttcgccgtgtcgctgtgcatcgtgctcccgctcagcctgcagcggaacatgatggcctccatccagtccttcagcgccatggccctcctcttctacaccgtgttcatgttcgtgatcgtgctctcctctctcaagcacggcctcttcagtgggcagtggctgcggcgggtcagctacgtccgctgggagggcgtcttccgctgcatccccatcttcggcatgtccttcgcctgccagtcccaggtgctgcccacctacgacagcctggatgagccgtcagtgaaaaccatgagctccatatttgcttcctcccttaatgtggtcaccaccttctacgtcatggtggggtttttcggctacgtcagcttcaccgaggccacggccggcaacgtgctcatgcactttccctccaacctggtgacggagatgctccgtgtgggcttcatgatgtcagtggctgtgggcttccccatgatgatcctgccatgcaggcaggccctgagcacgctgctgtgtgagcagcagcaaaaagatggcacctttgcagcagggggctacatgccccctctccggtttaaagcacttaccctctctgtggtgtttggaaccatggttggtggcatccttatccccaacgtggagaccatcctgggcctcacaggagcgaccatgggaagcctcatctgcttcatctgcccggcgctgatctacaagaaaatccacaagaacgcactttcctcccaggtggtgctgtgggtcggcctgggcgtcctggtggtgagcactgtcaccacactgtctgtgagcgaggaggtccccgaggacttggcagaggaagcccctggcggccggcttggagaggccgagggtttgatgaaggtggaggcagcgcggctctcagcccaggatccggttgtggccgtggctgaggatggccgggagaagccgaagctgccgaaggagagagaggagctggagcaggcccagatcaaggggcccgtggatgtgcctggacgggaagatggcaaggaggcaccggaggaggcacagctcgatcgccctgggcaagggattgctgtgcctgtgggcgaggcccaccgccacgagcctcctgttcctcacgacaaggtggtggtagatgaaggccaagaccgagaggtgccagaagagaacaaacctccatccagacacgcgggcggaaaggctccaggggtccagggccagatggcgccgcctctgcccgactcagaaagagagaaacaagagccggagcagggagaggttgggaagaggcctggacaggcccaggccttggaggaggcgggtgatcttcctgaagatccccagaaagttccagaagcagatggtcagccagctgtccagcctgcaaaggaggacctggggccaggagacaggggcctgcatcctcggccccaggcagtgctgtctgagcagcagaacggcctggcggtgggtggaggggaaaaggccaaggggggaccgccgccaggcaacgccgccggggacacagggcagcccgcagaggacagcgaccacggtgggaagcctcccctcccagcggagaagccggctccagggcctgggctgccgcccgagcctcgcgagcagagggacgtggagcgagcgggtggaaaccaggcggccagccagctggagggtaaggcctccgccctacagccgcctgcctcaggcccagggagcggcagccccctcccccagccctggggtgatgcccaggtcatcctcgggagccctgccaggccccccttctctttccagccgcctgctgagcagacccctcggagagctttctgctcccttcccatcagcagcttgctttctgggaaccttttatctgccttactcccctttaaacacctgcggcatcgtcacatggcttgtgattaccgttttatctcccttgctcccctttaaaacacctgcggcattgtcacttggcttgtgattaccatttcgtctttaaagcaggtttgttaacagttttaacactcggagtatttaaagccagccaggtgtgggcgtgcctgcacccagatgtggaggtttattttaaggctgtgccccaaggggacccagtttgggggtggctgtgcccgccctggtcctagcatagccctggcccagagcactgctcccacaccctcgggcctcggagctcggctgtgttcatctacagggatctgtcacctgtccctccaggaaagctccttacgcctttgctctcctgagaataaaacttgctctgaatcctcctccaaaaaaaaaaaaaaaaaa

SEQ ID NO: 417 - DNA, 1437 bp, HOMO SAPIENS
ggtactgagtgggggcgccgcgcctgcgcaaagcggacccgcggacggtggcgttaagggaacgctgaggtcccgcgctccccgaccgaggtatatctccatgaataacctaaatgatcccccaaattggaatatccggcctaattccagggcggatggtggtgatggaagcaggtggaattatgccctgttggttccaatgctgggattggctgcttttcgttggatttggtctagggagtcccagaaagaagtagaaaaagagagagaagcctaccgtcggagaactgctgcttttcaacaggatctggaagccaagtaccacgccatgatctcagaaaatcggcgtgctgtcgctcagttgtccttggaactcgaaaaggaacaaaacagaactgctagttaccgagaagcccttatctctcagggacgcaagttggtagaagaaaagaagcttctggaacaggaacgggcccaggtgatgcaagaaaaaagacaggtgcagcctttgagaagtgcgtatttgagctgcctgcaaagggaagaaaactggcaaaggagagccaggcttttgctgaaagaatttgaagctgttctcacagaaagacagaatatctactgcagtctgtttcttcctcgcagcaagcggctggagatagagaagagcttactggtgcgagcgtccgtcgaccccgtcgccgctgacctagagatggcagccggtctcaccgacatatttcagcatgatacatactgtggtgatgtctggaacaccaacaaacgccagaatggcagactcatgtggctctatctcaaatactgggaactcgttgtcgaactgaagaagtttaagagagtagaggaagccatactagaaaagtaagacaagagtgaaatcaaactgcttttagtgactcgaggccaggcagtcatgcgccttctgggtctccggcgtcttccgttcccgtgctgcccgtgtcatggccacaccgtcacccttcagcagcgacctccactcccgccaccgtctgagcagaagtgcaccgaagcctcagagacagagggtctcctcccgatgctctgccgctgttggggatatggtttcttgaagcatttttaggctgccagtattgtattaagcagaacagtataacctcgtattttagctccagggtaaaaatggttttttaaaaagtcaaatacaatactggtccttaccacaagtaattttctgtctgtttcatcactccctaaatactttctcctcaaattatttttctctgtcaccagattacattaagaatttgtcagataatgtgtagaactgcataacaggtaataggaagtagtaatattatattatcaagggtttatattttaaagatctctctcactccataaaggggaaataccaagtgttaaaaaaaaaaaaaaaaa

SEQ ID NO: 418 - DNA, 2066 bp, HOMO SAPIENS
cttggtgcttctttttcctgctcggtgagtttgtttgtttgtttgtttttgagacagagtctcactttgcttcccaggctggagtgcagtggtgcgatctcagcttactgcagcctccgcttccggggttcaagcgattctcctgcctcagcctgccaagtagctgggactaccggcgcccaccaccacgcctggctaatttttgaatttttagtagagagtgggtttcactatgttggccaggctggtctggaacgcctgacctcaagtgatccgtccgcctcggccttccaaagttctgggattacaggcgtgagccaccgcgcccggcctgagtgagtcttaatccgtggccatctgcgttcctgcaggcttcatctggccctatggtcccctggcatcatggctgccctcagatcccttgtgaagcccaagatcgtcaaaaagagaaccaagaaattcatccggcaccagtcagaccgatatgtcaaaatcaagatgagaagaataatgtctggggtgaaggtgaagcacccagcccaagactcagcagccaggaagtggcccagcgctctttataccacgggtgcaggaattcacacagaaaagtggaggccaaggcgtgagaattcctcaatgactgccctctaaaggaagaggaccaggcttcctgtcagagactgaggacccaggaagaaacatgtctcggcccctgtccccctccacaattcagaggccacattctaacaggggaggctgaccaattaaacagataatgacacctcctagagctaagagctctccgactatgaaccagatgcctggagaacacggatgaatggtctgagcatgagcaggggtgggaggcagcgttaagggaggcatcagagtcagaacctagcaaacaagtgtttgtgaagaagaattcatagaaaagggcaatgcgggcatcacatgggctaaggaacagaggggtagcagtagctgttgtgccaagctgcaggtgttatacactaccctctagatctgggtttccttaaaacaccttgagaggacaaccctgcaaagcacggcacagtggccgagagggaaaggagcattcgaggtctcagtcctcgctctgagcctacttctctgcttctgggctccagccatctttgtggaaagggggctgctagtgacaccctctcaagggtctttccagctctaggtcggctgtgctggagtctaggatttgcccactgagaaatctgtttccaagttccttcaacctgatgcatcctgcagcatcacggcagctgttcagagtggtcagaaggcccctgaatgagctcagtagagggaagcctgggaacagggaggcacctgcagctctactcatggcctggccagagctcagcagctcttctctgccatctagtggggatggcataccatcactggggaccaccctgtgcaaactggtgagcctgagtgcctgtcacagagggaaagaaaggggggggatacaggatttagatgaaatagcaactcctaccctattgtcaaaatcatccagctttttcaaaacatcatattgtactgatttttttgtgtttttgacagagtcttgctgtgtcaccaaggctggaatgcagtggcatgatctcggctcactgtagcctctgtctccctggttcaagcaattctgccccagcctcccaagtagctgggactacaggcatgcgccaccacacccagctaagttttgtatttttttagtagagtcagggttttactttggccaggctggtcttaaactcctggcctcaactgatctgcctgtctcggcctcccaaagaactgggattacaggcatgaggcaccgtgcctgtcccatgttgtacttaatagatatttaccatatacaattattttttaatttaaataaatcaatgaacagtgttattttttaaatcttgtggctttaatacaccctttcaattctcagggagtgttttggtgatacaggctggggagttaaataaatgaacgaataaacttagttgttatccattcaaatattt

SEQ ID NO: 419 - DNA, 3688 bp, HOMO SAPIENS
acaggcagcctcatccgccatcactccgggaaccgagcaccccgctgcctcggcgcccaggctgctctctccgcgcatgctccttcccagcttgagcccgcgagtccagcctgccttcactcagtgcgcaagaccgcagccccctccccacgccccctccccagtaggcggccgtcgcggtgtgtttgcgtcatcgcgccacgccaccactggaacccgggggaagatggcggcagccgttctgagtgggccctctgcgggctccgcggctggggttcctggcgggaccgggggtctctcggcagtgagctcgggcccgcggctccgcctgctgctgctggagagtgtttctggtttgctgcaacctcgaacggggtctgccgttgctccggtgcatcccccaaaccgctcggccccacatttgcccgggctcatgtgcctattgcggctgcatgggtcggtgggcggggcccagaacctttcagctcttggggcattggtgagtctcagtaatgcacgtctcagttccatcaaaactcggtttgagggcctgtgtctgctgtccctgctggtaggggagagccccacagagctattccagcagcactgtgtgtcttggcttcggagcattcagcaggtgttacagacccaggacccgcctgccacaatggagctggccgtggctgtcctgagggacctcctccgatatgcagcccagctgcctgcactgttccgggacatctccatgaaccacctccctggccttctcacctccctgctgggcctcaggccagagtgtgagcagtcagcattggaaggaatgaaggcttgtatgacctatttccctcgggcttgtggttctctcaaaggcaagctggcctcattttttctgtctagggtggatgccttgagccctcagctccaacagttggcctgtgagtgttattcccggctgccctctttaggggctggcttttcccaaggcctgaagcacaccgagagctgggagcaggagctacacagtctgctggcctcactgcacaccctgctgggggccctgtacgagggagcagagactgctcctgtgcagaatgaaggccctggggtggagatgctgctgtcctcagaagatggtgatgcccatgtccttctccagcttcggcagaggttttcgggactggcccgctgcctagggctcatgctcagctctgagtttggagctcccgtgtccgtccctgtgcaggaaatcctggatttcatctgccggaccctcagcgtcagtagcaagaatattagcttgcatggagatggtcccctgcggctgctgctgctgccctctatccaccttgaggccttggacctgctgtctgcactcatcctcgcgtgtggaagccggctcttgcgctttgggatcctgatcggccgcctgcttccccaggtcctcaattcctggagcatcggtagagattccctctctccaggccaggagaggccttacagcacggttcggaccaaggtgtatgcgatattagagctgtgggtgcaggtttgtggggcctcggcgggaatgcttcagggaggagcctctggagaggccctgctcacccacctgctcagcgacatctccccgccagctgatgcccttaagctgcgtagcccgcgggggagccctgatgggagtttgcagactgggaagcctagcgcccccaagaagctaaagctggatgtgggggaagctatggccccgccaagccaccggaaaggggatagcaatgccaacagcgacgtgtgtgcggctgcactcagaggcctcagccggaccatcctcatgtgtgggcctctcatcaaggaggagactcacaggagactgcatgacctggtcctccccctggtcatgggtgtacagcagggtgaggtcctaggcagctccccgtacacgagctcccgctgccgccgtgaactctactgcctgctgctggcgctgctgctggccccgtctcctcgctgcccacctcctcttgcctgtgccctgcaagccttctccctcggccagcgagaagatagccttgaggtctcctctttctgctcagaagcactggtgacctgtgctgctctgacccacccccgggttcctcccctgcagcccatgggccccacctgccccacacctgctccagttccccctcctgaggccccatcgcccttcagggccccaccgttccatcctccgggccccatgccctcagtgggctccatgccctcagcaggccccatgccttcagcaggccccatgccctcagcaggccctgtgccctcggcacgccctggacctcccaccacagccaaccacctaggcctttctgtcccaggcctagtgtctgtccctccccggcttcttcctggccctgagaaccaccgggcaggctcaaatgaggaccccatccttgcccctagtgggactcccccacctactatacccccagatgaaacttttggggggagagtgcccagaccagcctttgtccactatgacaaggaggaggcatctgatgtggagatctccttggaaagtgactctgatgacagcgtggtgatcgtgcccgaggggcttccccccctgccacccccaccaccctcaggtgccacaccaccccctatagcccccactgggccaccaacagcctcccctcctgtgccagcgaaggaggagcctgaagaacttcctgcagccccagggcctctcccgccacccccacctccgccgccgcctgttcctggtcctgtgacgctccctccaccccagttggtccctgaagggactcctggtgggggaggacccccagccctggaagaggatttgacagttattaatatcaacagcagtgatgaagaggaggaggaagaggaagaagaggaagaagaagaagaggaagaagaggaagaggaggaagactttgaggaagaggaagaggatgaagaggaatattttgaagaggaagaagaggaggaagaagagtttgaggaagaatttgaggaagaagaaggtgagttagaggaagaagaagaagaggaggatgaggaggaggaagaagaactggaagaggtggaagacctggagtttggcacagcaggaggggaggtagaagaaggtgcacctccacccccaaccctgcctccagctctgcctccccctgagtctcccccaaaggtgcagccagaacccgaacctgaacccgggctgcttttggaagtggaggagccagggacggaggaggagcgtggggctgacacagctcccaccctggcccctgaagcgctcccctcccagggagaggtggagagggaaggggaaagccctgcggcagggccccctccccaggagcttgttgaagaagagccctctgctcccccaaccctgttggaagaggagactgaggatgggagtgacaaggtgcagcccccaccagagacacctgcagaagaagagatggagacagagacagaggccgaagctctccaggaaaaggagcaggatgacacagctgccatgctggccgacttcatcgattgtccccctgatgatgagaagccaccacctcccacagagcctgactcctagccatcttctgcaccccactctttgtttccaataaagttatgtccttagatagcgaaaaaaaaaaaaaaa

SEQ ID NO: 420 - DNA, 6680 bp, HOMO SAPIENS
actgaccccgctgtaccacggccctcttgcggacagccccggggacgtcgttgggacatcgctgggaccccgggctctgcagccacaaccatgtttggccggaagcgcagtgtctcctttgggggcttcggatggatcgacaagaccatgctggcaagtctgaaggtcaagaagcaggagctggccaacagctcggatgcgaccctcccagaccggccgctctcccctcctctcacggcacctcccaccatgaagtcgtcggagttctttgagatgctggagaaaatgcaggggatcaagcttgaagagcagaagccgggaccccagaagaacaaggacgactatatcccataccccagcatcgacgaggttgtggagaagggaggcccgtaccctcaggtcatcctgccacagtttgggggctattggatcgaggacccggagaacgtgggcaccccaacatcgctggggagcagcatctgtgaggaggaggaagaggacaacctcagccccaacacatttggctacaagctcgagtgcaagggtgaagccagggcctaccggaggcacttcctggggaaggatcatctaaacttttactgtaccggcagcagcctggggaacttgatcctgtccgtcaagtgcgaggaagcagaggggatcgagtacctccgggtcatccttaggtccaaactgaagacggtacatgagcggatccccttggctggactgagcaagcttcccagtgtccctcagattgcaaaggctttctgtgatgatgcagtgggactgagattcaatcctgtcctgtaccccaaggcctcccaaatgattgtgtcctatgatgagcatgaagtcaacaacacattcaaattcggagtcatttatcaaaaagccaggcagaccctggaggaggagctatttgggaacaatgaggagagcccagcttttaaggagttcttggacctgctgggggacacgatcacactgcaggatttcaaaggtttccgaggaggcctggacgtgacccacggacagacaggggtggaatcagtgtacacaacattccgggacagggagatcatgtttcacgtttccacaaagctgccatttaccgacggagacgcccagcagctccagagaaagagacacattggaaatgacatcgtggccatcatcttccaagaggaaaacacgccgtttgtcccagacatgatagcctccaatttcttacatgcctacatcgtcgtgcaggtcgagaccccaggcacagagaccccatcctacaaggtctctgtcactgcgcgggaagatgtgcccacctttggtccacctctgcccagtccccccgttttccagaagggcccggaattcagggagtttctgctcaccaagctcaccaatgccgagaacgcctgctgcaagtcggacaagtttgcaaagctggaggaccggaccagggctgccctcctggacaaccttcacgatgagctccacgcccacacacaggccatgctgggactgggcccagaggaggacaagtttgagaatggaggccacggggggttcctggagtcttttaagagggccatccgcgtacgcagccactccatggagaccatggtgggcggccagaagaagtcgcacagtgggggcatccctggcagcctcagcgggggcatctcccacaacagcatggaggtcaccaagaccaccttctcgcctccagtggtggcggcaacggtgaagaaccagtcacggagtcccatcaagcgacgctcggggctcttcccccgcctgcacacgggctcagaaggccagggcgacagccgggcacgatgtgacagcacatccagcacacccaagaccccagatggtggacactcctctcaggagataaagtctgagacctcatccaatcccagctctccggaaatctgccccaacaaggagaagcccttcatgaagttgaaggaaaacggccgtgccatctcccgctcctcctccagcaccagcagcgtcagcagcactgcaggggagggcgaggccatggaggagggcgacagtgggggcagccagccgtccacgacctcacccttcaagcaggaggtgtttgtctacagcccgtccccgagcagcgagagccccagcctgggggcagctgccaccccgatcatcatgagccggagtcccacagatgccaaaagcagaaactccccgagatcgaacctgaaattccgctttgacaagctcagccatgccagctctggtgcgggtcactaatgtgaaagtggagtccttcgcctgtccaagggaatcccctcttctgtcctggaaaaggctcctgtaccagcagtttgggagtgccgtccacgaccctgacagtcccagccctgctgccccatggccacgtgcccacagatgtgctgttggtccaggtgtcccagtctggccacagccctgcctccgccctcacctacatgccctcccagcccctcccatctctggacgaggcctccttcctcaggttcctcctgctcctgacctcccagtgtgatgtccgggtcctttatcatcctattcatcctggagaggaaaagtgtcgggcaaagggggatctggggggagctcagcagtgactggggagctggtctgcctcagagacagagtagggggtgggagcagagcctcggtgagggtcttggccacagggcagtgccttcctgaacgtggcaggctttactaccaggaacgcactcggtggtggaggccccatgttcccaggagccaagattcgtagcatccttgaggccatcctgataaaattcggcgctattgcccccgtagctctggagctctaaaccgtctatctgcttctgtgctgaacgcctttcccatctgctgacgtaggcccagggctgccctgcccctgctgccagtgtaccgtgagcggggctccagccagttcaagctcagagccagagctggacgggccagaactgcgctgcacacttcctggactgaggcggggactttgggtcccacccggtttctcctgattatggctgctgtggggtgaggggagggaggggcagccccgaggcagtctcttccctttgagaagatattttcccacaaaggggtgggaagccaggagtgagaaggaattcagggagagcaaaggagccagtgctgagatgctgctgtgttggttgaggaaaacctcgggcctgagggccaggccggagcccaggtctctgctgacaatgggggttcaaggaagacgtcgttatctcccctccccacttactcgaggagagaggtgagggggggatgacttgcgggttctgatcaggcccctgggtggggaaggggcacagtgtccctcagcagcttacgcccctggagtcttggggggcccagcctggccctggggccttttccagctactgtgcccttgggcagctgcgtctggggctcaaccccccaatcctgttcccctctccagctgcgggtctgtaggcagctgtcacatctgaagggtttctgcaacctggaccccatctgggtgtgggtcagaccctgtgacccacatgccacccccaccctccacagagcccccttgctgggacagccagctcacctccaaggacatcccctcctggcttctcccccttccgagtctgcagcgccgtgggcttctctgccgatgggcccgggttggggttaaggtgggcatcctccaggtacaacgagcctgaagagcccctttcagtgcagacggggctgcagagtgacactggctgggcacctgccccacgaccaatgacaaggatttccagctgaatgctttattcccatagggatctggacctgtgcccaagatataaatactacactttttttttttttttttaactgacattgtgaaattctccctatagcttttgccattcaagcaacattgtgatctttcttccccgccacgtgtgtgggaatgattgagtcctgtttgcaagctggagaggagctctccctttgctagtactttctctaaagtactagtctagtaaaatttattcttgttagaaggtcaacaaaatatctgtttagcttttatgaagagtcaccgtagcagcccccacggctggaaagaggcctgtacgttctggacgcgttttgttggctgggcttctggaggcactggcaaggtcaaactgcatttctttaagaacagttgcaggatctggctcgcctctgtgggaagccggcattacaggtgcttggtggatgggccgtgtcacattgccatctggggtcctttggggtttccaggttgtcaccatgctgtcccatttgggaatcccatacctgcctgtccccactgcgctggctgacccttgctgcctgctgcctcttgggagggctttgtccctgcctctgagctggtgggcaggatggctgggtggcccccagagaagcacagacctgagatggggtctccatgcccggtttgctgttggaatgatctgaacaggaccccaaatgcctcttccctctggtcatgcctcactatctctaggagctccatcctgtggcttccagagtgtgcacttccagcccacccgggcagtgctgagagggaggaggagaacaaggatggcccagcctcccctccctcccctagaccacggggcgggcagctcgggttcctggagggctgtttcccccacgctgtccctacatctgctctgatctaaaatgtctttccttttatgctgcgcccagtcttggggctcaaagatttgcccaaacctcattggccctcgtgactaggctcatctagatggtgctcacgctggtgtttgaggcatttccactgtgatctccacgaggggatgttttccgggacacatctctggctctgggaactgcctgactcactgaagaaactacttttcaggcactgtagggtcacccatatgcctccagctcagttgacgcttaaaaacaggtgcagaaaagctcgcgatggaaggtcttaatgagagtgtctgtctatgccaatcatgtaaaatgacgtttcttgaaaaagattcagtggttcagctttgtcagcatcatctcaacacaagcctgctggctctttttagcatctcatccaaccatgtcatcgtccagatgagaaatcttagcccaggtgaggggagtaacttgcttgaggtcacacagctggctgttggcaaagctgggattagaaccctcaacccagggtcccttcctctgcagcgcctacatggttggttgaataagtggctgcgtttcctggggccctgggttttggggaagccagttagctgctgctttggcactggcatggaggtgagcagtcaaggatgctggtgaggctgcagtttctgctctttttcatcaggggggatagtctctaggatttttcagtgaggacccttgggctttggatgcagcttgaaccaagaaaacgaggagggaaagggattcagtgaactattcctcagtgggatcggttcttcagctcctgatgggggctgtgtaatgggggcagaggccagggaaaaagatgctgttcacccaccctcagcttcccttttcctaaattaagaggaaaagtggtcaaagaaaaactcttcatttctccctgattcttaaacgaaggtggttaatagaaactcaggctcccgtgacaaggcaggacaagagcctgtttcgctttcctccctgaccctgccaggtgccaactcaaacactacctttctcattggtttctaagtcagtagagacagatctgttttaagcagttgggggttcgagtagatctcatgggtacaggaggccagcagggaccaggccagtcagccatgctcaggacccctcggctcctcccccagcctctagctaccctgtatcgaggcaaggggaggccagtaaagtttgccaagcctgatcctgcagcctggtggggctggctggggtattcttttaccaaactctgttttaccgccagccccttgtacaccccaatcccatgtctccctcccttcagctggaccgtgtgcccctttgggaggaagaagacaagccccactagggccaagggcagcagagccctgccgagtgagaggctgtggggcagcggctctgtcctgtgccttaccagccctggggaggggggcatttggctggaagactggaatttaattgccatcgtctttgattttgtgacatttctgcttggaagtgtgaactacccccccccccccgcttcctgctccttagcatgcgtgcagctctctcctgttttgggtgttccccttggacactccagctcggggactgctggcgtgtgaatgtgcagattcccctgtgtggtcgaacctaagaactgtggcttggaagtgatgctccatgtgacgacgactttgctttctttcctcttagtgaggaggtgattcgtagatcccaactgcctatgtaatgtaaataatgtacatttaatttattgctatggtagcacattgtatttgttaatgtacaaaacaaattctaaaaggttgacaaatgtatattttgttgcttaaatgtgtctttgcagaaattgacaataaataacatattttgtgtccaaaaaaaaaaaaaaaaaa

SEQ ID NO: 421 - DNA, 10897 bp, HOMO SAPIENS
agatatactgagtgagccctgagaagcagtctcagatcctgacggtgcagcagcccgcagcctcagccagggagtcccagccgctttcaatggaggagaagcccggccagccacagcctcagcaccatcacagccaccaccatccgcaccatcaccctcagcagcagcagcagcagccgcaccaccaccaccattattatttctacaaccacagccacaaccaccaccaccaccatcatcaccagcagcctcaccaatacctgcagcatggagccgagggcagccccaaggcccagccaaagccgctgaaacatgagcagaaacacaccctccagcagcaccaggaaacgccgaagaagaaaacaggctatggtgaactaaacggtaatgctggagaaagagaaatatctttaaagaacctgagttctgatgaagccaccaaccctatttccagggtcctcaatggcaaccagcaagttgtagacactagcctgaagcagactgtaaaggccaacacctttgggaaagcaggaattaaaaccaagaatttcattcagaaaaacagtatggacaaaaagaatgggaagtcttatgaaaataaatctggagagaatcagtctgtagataagtctgatactataccaattccaaatggtgtggtaacaaataattctggttatattactaatggttatatgggtaaaggagcagataatgatggtagtggatctgagagcggatatacaactcctaaaaaaaggaaagctaggcgcaatagtgccaagggttgtgaaaaccttaatatagtgcaggacaaaataatgcaacaagagaccagtgtcccaaccttaaaacagggacttgaaactttcaagcctgactatagtgaacaaaagggaaatcgagtagatggttcgaagcccatttggaagtatgaaactgggcctggaggaacaagtcgaggaaaacctgctgtgggtgatatgcttcggaaaagctcagatagtaaacctggtgtgagcagcaaaaagtttgatgatcggcccaaaggaaagcatgcttcagctgttgcctccaaagaggactcgtggaccctatttaaaccacccccagtttttccagtggacaatagcagtgctaaaatagttcctaaaataagttatgcaagcaaagttaaggaaaacctcaacaaaactatacagaactcttctgtgtcaccaacttcatcttcatcatcttcatcatctaccggggaaactcagacccaatcatcaagtcgcttatcccaggtccctatgtcagcgctgaaatctgttacttctgccaacttttctaatgggcctgttttagcagggactgatggaaatgtttatcctccagggggtcagccactgctaactactgctgctaatactctaacacccatctcttctgggacagattcagttctccaggacatgagtctaacttcagcagctgttgaacaaattaagactagcctttttatctatccttcaaatatgcaaactatgctgttgagcacagcacaagtggatctgccctctcagacagatcagcaaaacctgggggatatcttccagaatcagtggggtttatcatttataaatgagcccagtgctggccctgagactgttactgggaagtcatcagagcataaagtgatggaggtgacatttcaaggagaatatcctgctactttggtttcacagggtgctgaaataattccctcaggaactgagcatcctgtgtttcccaaggcttacgagctggagaaacggactagtcctcaagttctgggtagcattctaaaatctgggactactagtgagagtggagccttatccttggaacccagtcatataggtgacctgcagaaagcagacaccagtagtcaaggtgctttagtgtttctctcaaaggactacgagatagaaagtcaaaatcctctggcctctcctacgaacactttgttaggctctgccaaagaacagagataccagagaggcctagaaaggaatgatagctggggttcttttgacctgagggctgctattgtatatcacactaaagaaatggaatctatttggaatttgcagaagcaagatcccaaaaggataatcacttacaatgaagccatggatagtccagatcaatgaaggaccagactgcctattcgtaacctttctgcagcattagagccatcgttcatgggggacacaaggcttttatgctcctagatcttcaacgcagcagaggaaccataagtagaatcacaggataatatatacaaatatatatatatacatatatatatatatagttatttaaaaaaggcaactgaaagtaattagacttcttaaggaatcaaatttatttcaagagactacacatggttatttaatctccggtactgaataggttttttttcttctgttagtttttgtttttaagtgtgaatgcaagtgattaatgaatacagacttaacaagtgtggttctaaagttcctgctgtcatcaacttgggcaacaaatgacccactggaaaggcaaatccacttaaaagatctctgtatcttgttctgtgactgaagtgatacactaatcacggggaacccagaatgattcaacattttccccccactcctcccttgatctttttggttttactttaattaagccctgcgagaatgctggataaatgccttgaagttagcagggtgtatttttttagcgaatatgatttgcatgtcttgccaggagttaagcggcctctggggtgttggggaaatactttatttctttccatttattttttgtggggcggggataggggagggcattgaagttctacaattctggaatagttagttgatggtacatagttaacttggcttcggttacatattggactttaacaactgaagaatctatgcgtgtcatttaaagaaaagttgcagaacaagcaattggcttagatatacaatctggaaaaatattcctgtgcccatattttaatgtaattgtataactgggagcaaaaatatattctgcttttcaactgtaggtgctccagacttgctctccgtcactaacactaaatgtgctgttttccttgtttttcatcaaacatttaagacaaacttagacctttctgtaaattatcttttaatttctcagcaaaatctaaaaggggaagaaaaaagtccatgaaaactaaaacttttcatgtttttagccagtgagaagataataaaccctgactgtagaaggtgtgttttcatgcaaactatacttctgagcttgttagcttctaattatatcttaataaatatattttattactagagcaagatgggtttttaaggaaaataatgtgaaattctggaaattttctttggggcagagaagagcattagccctgtcttatcattacattgccatcctgttgcactgcagcttgtgtatagcatgctaaaataaatttttgtgtgtgtgtgcagaaattaagggtccaattgagattgggtgatgttagtaacataataacaagttgtctggcctgacacagcatcacatcacacacacagaaattagtatatccatgtatgtcaaatacaggttaaaatatcagggcatttatataaagagttgtagtcttctgataaaagtagactggatcccctggggtatttggggagaaagtaactactttggctctacccctagaaatgtccagttttgagtgactgtagtatggatgggttttcttgttttgttgattatttgaggcttttaaaacaagtagttcatgaaagaagctgttggactcaacatagagtagagtaactatctttttagtctggatttctgccctgcttagattttaaaagtataagcatggattgccaattccacttgatgtaaacaaaacttttttttatacataatatatatatatatatataaaataacttattgtatcagtccaggttcagaaacttgtggtaggccagttccagatagtttcatttcacctgtaaactgtatcactttgactgatattgtaattttcaaatgtataatatgtttacagatgtgccctgcatttagtctgccttgttcctattttgatttttgttgagtctcctgcctgcttgccaaaagctaggatgcttcaggcccatgtacaattgaaagcagaggcatccttgagctttaaagcattgaacaaactggaaaatgcaacataccacataactgaagtgaaaaaagtctgtgtttttgtgtttttttaaataaaaattttcaaaaagttaaaaaaaaagacatataaggttgattaaagggaaaaaaggctccagtttgttttacaggttttaaagttctgctgtgtgttcaattgccttgtgtaaccacttgtcgccttagggccagattcccctctctagtccccttttttaaatgtccattttgcttgcctggaattttaaagttcttccgtctcacaactcacaagaaactttctgggtttgtgacatacagaggttgaattgagtatatatttgaaaaggaaaaaacaaaaaacaaacccagaccccacctgaattgggctttttaacttagaagcaacacttgattaaacatctttagaaagctattgcttttctaatttccttccatatccctcaggcctcagtgttcagagaagccaaaaagaatgtatcacttctctgtctgtccaaaggtttttgagagtctcacttctaaatgaaacaatgcaacatttcactttgatttctccactgaaatttccttgattatatggttagaggtatgtagttaggaatgtctgttaactttctgagaaccctagtgccccatcatattaactgtcagtattttgggggcattaggttaatagacttaattgcctaggtacaagcaggactttgggacaaatctctttgtgctgtttggtaacacttaactctatttgttgcaatctttctccttaggtcctcacacaattccttacagagcacttattaaaaaaaaatcttaagagttgatctgttttctgattattttgtgtaagcttctaaacaaacttcagctgtgattaatttagcacatttaaataacgtgttattgtttggtataaagaattttccttcaactcagagtattagtactgtagcataaaccaaatacagtctagaggggatttttaacatccctccattataaagactgaaaaaggggtgtgtgtgtgtgtgtgtgtttatgtatgtatgtatgtgtgtgtgaggaaaagatggagatattaaaaattagtaaatgaatgtgtataagacattagtattcagagaatgaacttgtatttattttgtgccatttgttttcattacacagaaaaaagtcaggtggtttaaatccttaaaagggtagtattgaaaaatggcactaagaatgaaattatgacctatttttttaatagctatgaagatactaattatgggtgaagatttctttttaaatctgttttgattattgtaggcttctgtgtcacataccactcttgtaggtgtcctcaataatccccttttcccacaaaatacacagggtgtattatctttctctttattcacccccactttgctgaactgaagttaattacatagcctttcttctaacctccttagtaatgaaccttcacataaagtgtatttacagcgtctgtggtagccagcccttcctcctctactttctaggaggggatagccaataactaggaatttaatgacagatttttttttctttgaaataaatggccagagtttctccattttagaattttgttgtcctccttaatcatctgcttacctagtcattactcaatctgcagaaacttcataaaggaaaagtgctgcattgtttttacaaataacagtttgtagggaaaatatgacaaacctcaactatgggagttgtccacaatacaaaattttgaaaaaacattacatagtgataatatcatacttggttgttaggcttgttgcttccccacatcagaggcatctaatgatttatcttttgtaattgctgtgaacttttttaaataagccatttagtgtgaaattgtcatgtatcaaatggctattggaaatggactttactcaattttaattccactgtaaataaggacggagtcattcctacaaggctctcttcagagaaatagattaaaagtccaatttccaggtattattagtatagttatgccgctgggccacatcctcaacaacagctgatccctcttgtataaatatgttaactgtgcagaacagttatgttatgggacaaatataatggtcattatggtcagattggttgatgccacaccagtcaaggtagagtctgatagggcagtatcttaataaccctacccatgacttaactgttggatttgaaaggaaaacgtaggatttgctcttgtccccttacccgccacaaaattttgataatttgtttaaaagggagaggcagaggaaaagactagaagcataaatagctgctttaggtttgccagaggcacatagcttaacattagttcttaatatcgatgttatttttactaatgtaattaatcaacagagcaccaagattctttcatggtgaaaagggtgggcttctgttttggtatcttaaaatgtttcttttaaaatatacatcacctgtgtgagaaccaggaccacctgggagagtgatgaatcattggctccactcaaaagcattgctttactgagttttaaatttcacactgttttgccgctcaagaaaggtcttaaagtagttaaaggatgccagcaatagtgcgaatagaattttcggttgtctgcataataaaaacacccattgcagcatgattggtatgttgctcttgcattattgggaatggtaaatcagttatgggctagaaactatggaatggccgtcctcatatgtgatgggattgctgattcagacttccctattttccatacaattttgttatgtgcagagttctaaagccattttataatactgcagtatcccccccccccccacctttttttttttgagacggactgtctgttgcccaggctggagtacagtggcgcaatcttggctcactgcaacctccacctccctggttcaagcaattcccctgcctcagcctcccatgtagctgggattacgggcgcacaccaccacacctggctaatttgtattcttagtagagacggggtttcaccatgttgaccagactggtctcgaactcctgacctcaggcaatctgcccgcctcagcctcccaaagtgctggaattacaggtgtgagccaccgtgcccggccaagtatctcttttctacagccttattaaactaactacaaacatttattttccaatttagttttactttcagtgcatatcaaagttgttgtactcttcagaccaacaaattaacttgagggcaaattacatagctttccatgtacccttttttcctcaggtgctaatcaaaggctctgaaaatggatactgctttagtgatgtctgctttattcttaaaatgcttatttcttttgctagatgtaaagatttggtgttaacaaaagtggttttaatatgtaaatatgaatgaatgcctttagtttaccctgtttgtctattattaatctgttttcatttatccttcatagaggaggatcctttcatgatcttgaatacatttcattagatattgttgcattttaagaatgaaaatacaactgttttctgtcttagattaatcctgctgctatgagaaactgaaaatcaagaatgtgatgcactttttacattactatataccatacatataccataggttgctttgatacctttcctgtagcacagccactaacaagagtgaatgaattataaaattctttttgggagggaatcaatacaagtaactaattcttagctgatattgtcctatgaaggacaataacttaggaatataagaattctgttaatagtacactttttggccttaaatgtcttctactactgaaaatagtttaaatcttagctttgtttctattattccctctctctgcctcagaaagaggaattgggaagaatggcttaaaggacgtggtgtcattgatttgttgctgatcttttagaaaacatttgtctatgtaagctggggacttattttttgtttgtatatagaggggaaatagtgctgccctgaaccaatcagatttagtttaaatcaaatcaatcaaaactccagctgtttctcttgtctttttacttagcaaaggaaaactttagtgaatgctacttgacaagaagaaaagtcatttctcaagcacatacccaaacttgaaggtgattgaacccaaaataatgggtgggaaacaccaaatgaggtggaggaatgagaaagatgtgtgggccaaagctatctggttatattttgatgttgccaatatcgcaaagccaaaattttaatttgcttatttaatatatttgttggccagagatctatttttatatcaatgtgccttgcatgtatattaaaaaaaaaaaattggaaacgccatgtagtaatgcctgagatagtcgatggttcttaccacctcactaatttttatgcagtatgaaatgctcattctattgcccaactggtgctctctgtttaaagttacagatcttgcgaaactggaactattttataagctggggaagtgatttactttttttgttgtatcttttttgttcttagtctgttagtggctgtcctgtagtgggaaatagtaaaaggattcttcactcccttctcccctcagcaccttcttcaagtaaacatttcttgtgtgctttgaaaaaagtttcagcttgctgtctcttttagtgttttaaagaagtgttatacaaagcattgtttgcaaaatatagggagataatggagtccactttaatttggaattctgtgtgagctatgatccaagttatcagctctttccaactttaaaaattttgttaaaagcaccttgcttagaaaattttaaatatttatgtctgcaacaattgtctcaaaataataaactgtgcaattcttgtcattaaaaaaaaaaaagatctgaattttccctaatgtgacttgttagtttctctctgtatttcctgccagtgtaaatgtgaaagctttgcttgcattacgttttagaaatgcattttgcacactcgaattttgccgaagctccgtgaaaaggttagatctaagtagatgaataaagctatgcacatgttttgaaagtttaatttgtgtgtcattaccaaaagtgaccgatttgtccttactactttgctgttgttagctttaccatctttggaaacttggctcaaagttacatagttctgggctagctcatcagtggaactaggagagaggaaaactggcacctattttaataaagttcaatttaaacgagagcttgacttgtatctattaaagagcttttcttgaaacagggcagttttatcagctttacaaatcattggatgctcttccttagtaatattttggtttatttgatcaaatagaaatggaaagtaattcaaactgaaagacccttttttgtcatatggaacttggtgacgattttttgtcttaaagctggtttaaaggtaggataggcttttacctttattgctttagcataaatttggtttactgaattgactggcttgagattagaattattcagttgtttgtaagatcaaagcactggttgttttaaagataacgtgtatcttttaaaaaattgcccaagctgattagaacaagtttaggagttgggtacatttggttcaagtgctgcaatctgtatgtactaaatagctttactttgtgtatgtgtacttataatgtgtagatgtactactacccaggttttgtcaaatcatcttttttaaagtttttttttttttaattggttcaggacctttgtaggagaggctaatatgtttaagtagaagatattactgatagcattttccccatgctcctacataaaaaataaatatttccattttatagctttttcaatatacagaagagggttacttcttcatcaagtatattgttgcctttgaggacacagcaaaacccttctatatgtatcttcattgatagtggcagttaaaaactaagttatccagttaagacttaaaaggtgacccatattaattgcatggccttaaaaggcagaaatgcaggagtgtagcaagcatcattttagatggctatggttcctcttccgcatctgtcagtagttcacttatgttcagtcttagaacctactggaggagtgaagtaatttctctgtctcgtgcagaggcactaaggagctgagttacctcttaatctgggggaatggataataagtggagtacagttatgttaaaggatgttccccccgctcaaaaaaaagtttcaatgtttgttttgcccagtcaaaaatataggtcttttctacatataagaacagtcaccagaaattttcccttttgctaaatgcttaggtatttgctatagctgtttctgatgtcatggattctgaggaagtgtcatttacgtgatgatcttcctttattgatgtcttcatcatgttcagtgttttaaaaatataaattacaaacactctacaaccatacccagatttacttattttatcagaaaaaaaacttgagaaatttgtagatcaaattgagagacaataagtgtacattgttgaataaaaaattttaaagtttctgaaaaaaaaaaaaaaaaaa

SEQ ID NO: 422 - DNA, 5441 bp, HOMO SAPIENS
aattcctacttcctgaaactgaagccgtttatgagaaacagtgtgtttcagagaggctgtaccagaattaactctgctcagagttagatttgctggtcttaaagtacttttcctctttaagataaaagaagttcttctaaatcaggaatggattgaaatctaatgaaccgaaactttgggtacttcggccttcaaggggctcctttattgagaatcaatgtcttctcctaggtaattgatcaccctagacccagggacacccaattcatcgtaatcatcatgaataatcaaaaagtggtagctgtgctactgcaagagtgcaagcaagtgctggatcagctcttgttggaagcgccagatgtgtcggaagaggacaagagcgaggaccagcgctgcagagctttactccccagcgagttaaggaccctgatccaggaggcaaaggaaatgaagtggcccttcgtgcctgaaaagtggcagtacaaacaagccgtgggcccagaggacaaaacaaacctgaaggatgtgattggcgccgggttgcagcagttactggcgtccctgagggcctccatcctcgctcgggactgtgcggctgcggcggctattgtgttcttggtggaccggttcctgtatgggctcgacgtctctggaaaacttctgcaggtcgccaaaggtctccacaagttgcagccagccacgccaattgccccgcaggtggttattcgccaagcccgaatctccgtgaactcaggaaaacttttaaaagcagagtatattctgagcagtctaataagcaacaatggagcaacgggtacctggctgtacagaaatgaaagtgacaaggtcctggtgcagtcggtctgtatacagatcagagggcagattctgcaaaagctggggatgtggtacgaagcagcagagttaatatgggcctccattgtaggatatttggcacttcctcagccggataaaaagggcctctccacgtcgctaggtatactggcagacatctttgtttccatgagcaagaacgattatgaaaagtttaaaaacaatccacaaattaatttgagcctgctgaaggagtttgaccaccatttgctgtccgctgcagaagcctgcaagctggcagctgccttcagtgcctatacgccgctcttcgtgctcacagctgtgaatatccgtggcacgtgtttattgtcctacagtagttcaaatgactgtcctccagaattgaaaaacttacatctgtgtgaagccaaagaggcctttgagattggcctcctcaccaagagagatgatgagcctgttactggaaaacaggagcttcacagctttgtcaaagctgctttcggtctcaccacagtgcacagaaggctccatggggagacagggacggtccatgcagcaagtcagctctgtaaggaagcaatggggaagctgtacaatttcagcacttcctccagaagtcaggacagagaagctctgtctcaagaagttatgtctgtgattgcccaggtgaaggaacatttacaagttcaaagcttctcaaatgtagatgacagatcttatgttcccgagagtttcgagtgcaggttggataaacttatcttgcatgggcaaggggatttccaaaaaatccttgacacctattcacagcaccatacttcggtgtgtgaagtatttgaaagtgattgtggaaacaacaaaaatgaacagaaagatgcaaaaacaggagtctgcatcactgctctaaaaacagaaataaaaaacatagatactgtgagtactactcaagaaaagccacattgtcaaagagacacaggaatatcttcctccctaatgggtaagaatgttcagagggaactcagaaggggaggaaggagaaactggacccattctgatgcatttcgagtctccttggatcaagatgtggagactgagactgagccatcggactacagcaatggtgagggagctgttttcaacaagtctctgagtggcagccagacttccagtgcttggagcaacttatcagggtttagttcctctgcaagctgggaggaagtgaattatcacgttgacgacaggtcagccagaaaagagcctggcaaagaacatctggtggacactcagtgttccactgccttgtctgaggagctagagaatgacagggaaggcagagctatgcattcattgcattcacagcttcatgatctctctcttcaggaacccaacaatgacaatttggagccttctcaaaatcagccacagcaacagatgcccttgacacccttctcgcctcataataccccaggcattttcttggcccctggtgcagggcttctagaaggagctccagaaggtatccaggaagtcagaaatatgggacccagaaatacttctgctcactccagaccctcatatcgttctgcttcttggtcttctgattctggtaggcccaagaatatgggcacacatccttcagtccaaaaagaagaagcctttgaaataattgttgagtttccagaaaccaactgcgatgtcaaagacaggcaggggaaagagcagggagaagaaattagtgaaagaggcgcaggccctacatttaaagctagtccctcctgggttgacccagaaggagaaacagcagaaagcactgaagatgcacccttagactttcacagggtcctgcacaattctctgggaaacatttccatgctgccatgtagctccttcacccctaattggcctgttcaaaatcctgactccagaaaaagtggtggcccagtcgcagagcagggcatcgaccctgatgcctccacagtggatgaggaggggcaactgctcgacagcatggatgttccctgcacaaatgggcacggctctcatagactgtgcattctgagacagccgcctggtcagagggcggagacccccaattcctctgtaagcggtaacatcctcttccctgtcctcagcgaggactgcactaccacagaggaaggaaatcagcctggaaacatgctaaactgcagccagaactccagctcatcctcagtgtggtggctgaaatcacctgcattttccagtggttcttctgagggggacagcccttggtcctatctgaattccagtgggagttcttgggtttcattgccgggaaagatgaggaaagagatccttgaggctcgcaccttgcaacctgatgactttgaaaagctgttggcaggagtgaggcatgattggctgtttcagagactagagaatacgggggtttttaagcccagtcaactccaccgagcacatagtgctcttttgttaaaatattcaaaaaaatctgaactgtggacggcccaggaaactattgtctatttgggggactacttgactgtgaagaaaaaaggcagacaaagaaatgctttttgggttcatcatcttcatcaagaagaaattctggggaggtatgttgggaaagactataaggagcagaaggggctctggcaccacttcactgatgtggagcgacagatgaccgcacagcactatgtgacagaatttaacaagagactctatgaacaaaacattcccacccagatattctacatcccatccacaatactactgattttagaggacaagacaataaagggatgtatcagtgtggagccttacatactgggagaatttgtaaaattgtcaaataacacgaaagtggtgaaaacagaatacaaagccacagaatatggcttggcctatggccatttttcttatgagttttctaatcatagagatgttgtggtcgatttacaaggttgggtaaccggtaatggaaaaggactcatctacctcacagatccccagattcactccgttgatcagaaagttttcactaccaattttggaaagagaggaattttttacttctttaataaccagcatgtggaatgtaatgaaatctgccatcgtctttctttgactagaccttcaatggagaaaccatgcacatagaatacggcacagtctggtcctttggggcttgggcagggccgtgacacaggttctggccaatgatttgcaagaggaattgatcagtatcactttaagtcctgcatttaattggcagcacaagatcctgcagagcctctttccctctgccacagttatcaagaatgggtcaggagaccgctgcttctgggcataagtcctgcaaggaaagcaacatggaaaacagccccaactcacccatgagggatgaaaagcactcttgagaaaggcatgtgttgtttaagccattgagattttagagctttttgtcactatctgtcaagactgatactactggggcttttcctattgatttgggagttctttacatattaaaaaaatgtgagcctttgtgatacgaattcaatttgttttcctgtcttttgacatttgactttgcataaaagtttatctgtgcataattttatatgtagttgaattcatcaatcttttattttgtatggctttttggttatgtataatacttagatcctccttatactctgagtttctttctttttaattctcctgtatttccttctagtataattaaatctgtaaaaagtaagatggaagagtggtacagttttctttatccagtctgtccttgatgggcatttaggtagactggataaagaaaatgtggtacatatacaccatggaacactatgtgtattaatccactctcacactgctatgaagagatacctgagactgggtaatttagaaagaaaagaggtttaattaactcacagttccacatggctggggagacctcaggaaacttacaatcatggcagaaggcacctcttcatagggtagcaggagagagaatgagtgccagcaggggaaatgccagatgcttataaagccatcagatcttgtgagaattcattcactctcacgagaacagcatgggaaaaactgcctcaattacctcctaccaggtccttcccatgacacatgggaattatgggactacaattcgagatgagatttgggtggggacacaaagccaaaccatatcacaatgtaaccataaaaaagaatgagatcatgtcctttgcagggacatggatagagctggaggccattatttttagcaaactaatgcaagaacagaaaactaaataccacttgttctcacttataggtgagagctaagtgatgagagtaggtggacacatagagggaacaacacacaccagggcttatcagagggtggacagtgggaggagggagaggatcaggaaaaataactaatgggtactaggctgaatacctgggtgatgaagtaattcgcacaacaaacccccatgacacaaacctgcacatgtacccctgaacttaaaataaaagtaaaaaaaaaaaaaaaaaaaaaaaaaaaaaaa

SEQ ID NO: 423 - DNA, 27745 bp, HOMO SAPIENS
cccgggcagtggaaaccgtgggcaaaagttagctggcaggacagcgcagctcctccaggcagcggaggcagcgcgtcccggctctcagggacatttccttcccacctcgacccccgggaggtggtcccggtataaaggctcgctgagcgggtgggtcacagcacagctttgcagctgcggagaaacgcccaaggccgtgcatctccaggagggcggctgggctcccgcagtcctgcagaccgcgcccgatcccggcgacagggcgggcggacagccgcgcatccccggggtcccgccgagcctgggcgcagagagccgggaggaagcgttcgctcgcttcgccttgctgctgggaaactgaacgaggccgagagagaaggttcttgagttcatgtaagaggacagtcttaaaacggaagaagaaaaagaagcagttcagtctttgggagagctgcctccttgttgagtgctgcaaaggcctggaattcatttatgacagaatagatctagaaaagtccaagcatgttttctagagtggtgtagccctgtgctgcctccagtgaagagtctcttggtgttggcttcgtgcttccggagggaccatggcaacctccagaggggcctcccggtgtcctcgggatatcgccaatgtgatgcagaggctgcaagatgagcaagagatagtacaaaaacgaactttcacaaaatggatcaactctcatctggccaagcggaaacctccaatggtggtggacgatctttttgaagacatgaaagatggtgttaaactgcttgcccttctggaggtcctgtctgggcagaaactgccttgtgaacaaggacgccggatgaagcgaatccatgctgtggctaacattggcacggcactcaagttcctcgaaggaagaaagattaaattagtcaacattaactccaccgatatagctgatggccgaccctcaatagttcttggattgatgtggaccattattctatatttccagattgaagagttgaccagcaacctgccccagctccagtctttgtccagcagcgcatcctccgtggacagcatagttagctctgagactcccagcccaccaagtaaacggaaggtgaccaccaagatccaaggaaatgctaagaaggctttattaaagtgggttcagtacacagctggcaagcagactggaatagaagtaaaagattttgggaagagttggagaagcggggttgcctttcattcagttattcatgccattcgaccggaattggtggacttggagacagtgaaaggcagatccaaccgagaaaatttggaggatgctttcactatcgccgaaacagaactggggatcccaagactgctagatcctgaagacgttgatgtggataaaccagatgagaaatctattatgacctatgtagcccagtttctgaaacattatcctgacatccacaatgcaagcactgatgggcaagaggatgatgaaatacttccaggtttcccatcttttgcaaattctgtacaaaattttaagagagaagacagagtaatttttaaggaaatgaaagtttggatagaacaatttgagagagatttgacaagagcacagatggtggaatcaaatttacaggataaatatcagtcatttaagcacttcagagttcaatatgaaatgaagaggaaacagattgaacatttaatacaaccattacacagagacggtaaattgtcacttgaccaagcattggtaaaacaatcttgggatagagtgacctccaggctctttgactggcatatacagcttgataaatctcttcctgcacctctgggcaccataggtgcctggctgtacagagcggaggtggccctgagagaggaaataaccgttcaacaggtccacgaggaaacagcaaacacgatacaacggaaacttgagcaacataaggatctgcttcaaaacacggatgcccacaaaagagcattccatgaaatctaccggaccaggtctgttaacgggattccagtgccacctgatcaattagaggacatggccgagaggtttcattttgtttcctccacatcagagctacacctaatgaaaatggaatttttagaattaaagtaccgtctgctctcactgctggttcttgcagagtcaaagctgaagtcttggatcattaagtacgggaggagagagtcagtggagcagcttctacaaaactacgtgtcttttatagaaaatagcaagttctttgaacaatatgaggtgacataccagatcttgaaacagacagctgagatgtatgtcaaagcagatggttcagtggaagaagctgagaatgtgatgaaattcatgaatgaaaccaccgctcagtggaggaatctctcagtagaagtgaggagtgtgaggagcatgctggaagaagtgatctctaactgggatcgctatggcaatacagtggctagtctgcaagcctggctagaggatgctgaaaaaatgctcaatcaatcagaaaatgccaaaaaggatttttttcgaaatttacctcattggattcagcagcatactgccatgaacgatgctggcaattttctaattgaaacctgtgatgagatggtttcccgtgacctgaagcagcaattactgttgctaaatgggcggtggagggagttgtttatggaagtcaagcaatatgctcaagctgatgagatggacagaatgaagaaggaatacacagactgtgttgttaccctgtctgcttttgcaacggaagcccataagaaactttctgaacccttagaagtctcttttatgaatgtcaagctattaattcaagacttggaggatattgagcagagggtgcctgtgatggatgcccaatacaagataattacaaagacagcacacctcattaccaaagaaagcccccaagaagaaggaaaagaaatgtttgcgaccatgtcaaagctcaaagagcagctaaccaaggtcaaagaatgttactccccactcctttatgagtctcagcagctgttgattccgttggaggaattagaaaagcagatgacgtccttttatgactcacttgggaaaatcaatgaaattatcacagttcttgagcgtgaggcacaatcgagtgccctttttaaacaaaaacatcaggaactgttagcttgtcaagaaaactgtaagaaaaccttgacacttattgagaaaggcagtcaaagtgttcaaaagtttgtgaccttgagcaacgtgttaaagcattttgatcagacgaggctacaaagacagattgcagatattcatgttgcttttcagagtatggtaaagaaaactggagattggaagaagcatgtggaaaccaacagtcgcttgatgaagaagtttgaggagtctcgagcagagttggagaaggtactgcggattgctcaggagggcctggaggaaaagggggatccagaggagctcctgcggagacacactgagtttttcagtcagctggatcagagggtgctcaatgctttcctgaaagcttgtgatgaactcaccgacatccttccagagcaggagcagcaggggctgcaggaagctgttcgaaagctccacaaacaatggaaggatcttcaaggagaagccccttatcatttgcttcatctgaagattgatgtggagaagaataggttcttagcctctgtagaagaatgcagaactgagctggatcgagagaccaagctgatgccccaggaaggcagtgaaaagataattaaagagcacagggttttcttcagtgacaaaggtcctcatcatctctgtgagaaaaggttacagctcatcgaggaactctgtgtgaaactcccagtgcgggacccagtaagggacacacctggaacctgtcacgtgactctcaaagagctcagagctgccattgacagcacctacaggaagctcatggaagacccagacaagtggaaggactacactagcagattctctgagttctcatcttggatatctacaaatgagacacaattaaaggggatcaagggtgaggccatcgatactgccaaccacggagaggttaaacgtgccgttgaagagatcagaaatggtgttaccaaaaggggtgagaccctcagctggctgaaatccaggctgaaagttttgacagaagtttcttctgagaatgaagcccaaaagcagggagatgagctggcaaaattatccagctctttcaaggctcttgtgacgctgctgtcagaggttgaaaagatgctaagcaattttggggactgtgtccagtacaaagaaatagtcaaaaattctctcgaagaattaatttctggctctaaagaagtccaggaacaagctgagaagatcttggatactgaaaatctgtttgaagcacagcagttacttcttcatcaccagcaaaagacaaagcggatctcagcaaagaagagagatgtgcagcagcagatcgcgcaggcgcagcagggagaaggggggctgcctgaccgaggccacgaggagctgcggaagctggagagcacactggatggcctggagcgcagccgggagaggcaggaacgccgcatccaggtcacattaagaaaatgggagcgatttgaaacaaacaaagaaacagtagtaagatacctttttcaaacaggttccagtcatgaacgcttcttgagttttagcagtttggaaagtttatcttcagaactggaacaaacaaaggagttttctaaacggacagaaagtattgcagtccaggctgagaaccttgtaaaggaagcttcagagataccgcttgggccccaaaataagcagctgcttcaacagcaggccaagtcaatcaaagaacaagtcaaaaaattagaagacacgcttgaagaagatattaaaaccatggaaatggtgaaaaccaagtgggatcattttggcagtaattttgagactctgtccgtctggataactgagaaagaaaaagaactcaatgccttggaaacttcgtcatctgccatggacatgcaaatcagccaaattaaggtcacaattcaggaaatagaaagtaagctcagcagcattgtaggattagaagaagaagcccagtcttttgctcagtttgttaccactggagaatctgctcgaattaaagccaagttgacacaaataagaagatacggggaagagcttcgagagcatgcacagtgtctggaaggaacaatcctgggacatttatctcagcagcaaaagtttgaagagaaccttagaaagatccagcaatctgtgtctgaatttgaagataaacttgctgttccaattaaaatatgttcttcagctacagaaacatacaaagttcttcaagaacatatggatctctgccaggccctggagtcactgagcagcgcgatcactgccttctcagccagtgccaggaaggttgtgaacagagattcctgtgttcaggaggctgcggctctacagcagcaatacgaggacatcctaaggagggcgaaggagagacagacggcgctggagaatctgctggcccactggcagaggctagagaaagaactatcatcctttttgacctggttagagcggggtgaagctaaagccagttccccagaaatggacatttctgcagacagagtcaaagtggaaggtgaacttcagttaatacaggcactgcaaaatgaagttgtatcccaggcctcattctatagcaaacttttgcaattgaaggaatcattgttctcagtagcctccaaagatgatgtgaaaatgatgaaactacatttggagcagttggatgagagatggagagatttaccacagatcattaacaaaaggattaattttcttcagtctgtggttgctgaacaccagcaatttgatgagctgctgctttccttttctgtctggattaaactgtttctcagtgaattacaaactacctctgagattagcataatggaccatcaagtagcccttactcggcataaggaccacgcagcagaagtagagagcaaaaagggcgaattgcagagtctgcagggtcacttagcaaagttgggttctctgggccgtgctgaggacctccacctcctgcagggaaaggctgaggactgcttccagctgtttgaggaggccagccaggttgtggagaggcggcagcttgccctgtcccatttggcagaattcctccagagccatgcctctctgtccggcattctccgccagctgaggcaaacagtggaagcaaccaacagtatgaataagaacgagtctgatttgatagaaaaggacctcaatgatgctcttcaaaatgctaaagcattagaatctgctgccgtcagtctggatggcattctttccaaagcccaataccatctgaaaatcgggagctctgagcaaaggacttcctgcagagccacggctgatcagctctgtggagaggtagagaggatccagaaccttctgggaaccaagcagagtgaggcagatgctctggcagtgttgaaaaaagcattccaagaccagaaagaggagcttctgaaaagcattgaggacattgaagaaaggactgacaaagagcgattgaaagaacctacccgccaagctcttcagcagaggttaagagtgtttaatcagctagaagatgaattgaattctcacgagcatgaactatgttggttgaaagacaaagccaagcaaattgcccagaaagatgtagcttttgcacctgaagttgacagggagataaaccgcttagaggtcacctgggatgataccaaaagactaattcatgaaaatcagggtcagtgctgtggacttattgacttaatgagagaatatcagaacctgaaatcagctgtatctaaagtcttagaaaatgccagcagtgtgattgtaaccagaactaccataaaagatcaggaggatcttaaatgggctttttccaagcatgaaactgccaagaacaaaatgaattacaaacagaaagacttggataactttaccagcaaaggaaaacacttgttatctgagctgaagaaaattcacagtagtgatttcagcttggtgaaaacagacatggagagcaccgtggacaaatggctggatgtatcagagaaacttgaagaaaacatggataggctgagagtaagcctgtccatttgggatgatgtactgtcaactagagatgagattgagggatggtcaaacaactgcgttccacagatggcagaaaacatcagcaacctggataaccacctcagagctgaagaactgcttaaagaatttgagtctgaagttaaaaacaaagcattgagattggaagaactgcattccaaagttaatgatctgaaagaattaactaaaaatctagaaacaccgccagaccttcagtttatagaagcagacttaatgcagaaactggagcatgccaaagaaataactgaagtagcaaaaggaaccctgaaggatttcacggctcaaagtacacaagtggagaagtttattaatgacataacaacatggttcacaaaagtggaagaatcgttgatgaactgtgcccaaaatgagacttgtgaagcattgaaaaaagtcaaggatatacaaaaagaacttcaaagtcaacaaagcaacatcagctctacccaagaaaatctcaatagcttgtgccgcaagtaccactcagctgagttggagagcctgggccgtgcaatgactggtctgataaagaaacatgaagccgtgagccagttgtgctccaaaacccaggccagcctgcaggaatctctggaaaaacacttcagtgagtctatgcaggaattccaagaatggtttttgggagcaaaggcagcagcaaaagaatcatcagatcgcaccggtgacagcaaagttctagaagcaaagctccatgatcttcagaacattttggactcagtcagtgatgggcagagcaaacttgatgcagtgactcaagaaggacaaactttgtatgcacatttgtctaaacaaattgtcagtagcattcaagaacaaatcacaaaggccaatgaagagtttcaagcatttctgaaacaatgccttaaagataagcaggctcttcaagactgtgcttcagaacttggaagctttgaagatcagcacagaaaactgaacttatggatccatgaaatggaagaaaggttcaatacggaaaacttgggagagagtaaacagcacattcctgagaagaaaaatgaagttcataaagttgaaatgtttttgggagaactgctggctgcaagagagtctcttgataagctttcccagagagggcagcttctgagtgaagaaggccacggtgctgggcaggagggccgcctgtgttcccagctcctcacaagccaccagaacctacttagaatgaccaaagagaaactccggagctgccaggtggcccttcaggagcacgaagccctggaggaagcactgcaaagcatgtggttctgggtgaaggccattcaggacagactggcctgtgcagagagcactcttgggagcaaagacaccctggagaaacggctgtcacaaatacaggatattctcctgatgaaaggtgaaggggaagttaagttgaatatggccattggcaagggggaacaggccttgagaagtagcaacaaagaaggtcagagggtgattcagactcagttagagacccttaaagaagtgtgggctgacatcatgagctcctccgtccacgctcaaagcactttagagtctgtgattagccaatggaatgactatgtagagaggaaaaaccagttggagcagtggatggaatcagtggatcaaaaaatagaacatcccttacaaccacagccaggtctgaaagagaagttcgtcctgcttgaccacctccagtccatcctgtctgaggcagaagatcacacgagagcccttcaccgtctaattgcgaagtccagggagctctacgaaaagacagaggatgagtctttcaaggacacagctcaagaggagctgaaaacacagtttaatgatataatgactgttgccaaggaaaaaatgaggaaagtggaagagattgtgaaagatcatctaatgtatttagatgcggtccacgagttcacagattggctccattcagcaaaggaagaacttcaccggtggtcagatatgtctggagattcatcagccacccagaaaaagttatcaaaaattaaggagctgatagattccagagagattggtgcaagccgtctcagcagagtggagtcgctggctcccgaagtgaaacagaacacaactgccagtgggtgtgagctcatgcacacggagatgcaggccctgcgtgccgactggaagcagtgggaagacagtgtattccaaacgcagagctgtttggagaacctggtcagccagatggccctttcggagcaggaattctcaggccaagtggctcaactggagcaggccctggaacagttcagtgcccttctgaaaacctgggctcagcagttaaccctcctggaaggcaagaacacggatgaggagatagtggaatgctggcacaaaggacaagagatactggatgctttgcaaaaagcagagcctagaacagaggatctcaagtctcagctgaatgaactttgtcgattttccagagacctgagtacctacagtggaaaagtttctggcttgattaaagagtataattgtctttgtttgcaagcatccaagggctgccagaataaagaacagattttacagcaaagatttcgaaaggccttcagggatttccagcagtggttggttaatgcaaaaatcactaccgccaagtgttttgatatacctcaaaatataagtgaagtttcaactagtcttcagaaaatacaggagtttttgtcagaaagtgaaaatggacagcacaagctaaacatgatgctgtctaaaggggaacttctgagtaccctgctgaccaaagagaaagcgaaagggatccaggccaaagttacagctgcaaaagaagattggaaaaattttcattcaaatctccaccaaaaagaatctgctctagagaatctaaagatccaaatgaaggactttgaagtaagtgctgagcctatccaggactggctgagtaaaactgagaagatggtccatgaaagcagcaatcgcctctatgatctgccagcaaagaggagggagcagcagaagctccagtctgtccttgaggaaatacactgctacgagcctcagctcaacaggctgaaagagaaagctcagcagctgtgggaaggacaagctgccagcaagagctttaggcacagagtgtcgcagctgtcttctcagtatctagcgctaagcaatttaacaaaggagaaagtgtcaagactggatagaatcgttgcagaacacaatcagttctctcttgggattaaagaattacaagactggatgacggatgcgattcacatgctggattcatactgccacccgacatccgacaaaagtgtgctggacagcaggacgctcaagctcgaggctctattatcagtcaaacaggaaaaagagattcagatgaaaatgatagtgaccaggggagaatctgtccttcagaatacttctccagaaggcattcccactattcagcagcagctgcagagtgtgaaggatatgtgggcatcccttttgtctgcagggattcgttgtaaaagccaactcgaaggagctctctccaagtggacaagttatcaggatggcgttcgacagttctccggttggatggatagtatggaagccaacctgaatgaatcagaaaggcagcatgcggagctgcgggataaaacaacgatgctcggaaaagccaagttattaaatgaagaagtgctgagttacagcagcttgctggagaccatcgaagtcaaaggggctggcatgacagaacactatgtcacccagctagaactccaggatctacaggaacgatacagagccatccaagagagggccaaggaagccgtaaccaagtctgaaaaacttgtccgcctgcaccaagagtatcagagagacctaaaggcatttgaagtttggttggggcaagaacaagaaaagctcgaccagtattcagttcttgaaggtgatgcccacactcatgagacaacattgcgtgatcttcaggagctacaggtacactgtgcagaggggcaggccctgttgaactcagtgctgcacaccagagaggatgtgatcccatcaggtatcccacaggcagaggaccgggctttagagtctctccggcaagactggcaggcttaccagcacaggctgtccgagactcgaactcagttcaataacgtggtgaacaaattgaggctaatggagcaaaagtttcagcaagtagatgaatggctcaaaacagcagaggagaaagttagtcccaggaccagacgtcagtctaacagggcaaccaaggagatacaattacatcagatgaagaagtggcacgaagaagtgactgcatacagagatgaagttgaggaagtgggagctagagctcaggagatactggacgagagccacgtgaacagcagaatgggttgccaggccacccagctgacttccagataccaggccctgcttctccaagtgctggaacaaataaaattcctggaggaggagattcagagtttggaggaatcagaatcatccctcagttcctattctgattggtatggctctactcataaaaacttcaagaatgtggctaccaagattgacaaagtagatacagtaatgatggggaagaaattgaagacgttggaggttttgctcaaagacatggagaaaggtcacagtttgctgaaatcagcccgggagaaaggagagagggctgttaaatacttggaggaaggcgaggcagagaggttaagaaaggagattcatgatcacatggagcagttgaaggaactgaccagcactgtccggaaagaacacatgacgctggaaaaaggtcttcatttagcaaaggaattctcagataaatgcaaagcactgacacagtggatagcagaataccaggaaattctacatgttcctgaagaacccaaaatggaattatatgagaaaaaagctcagttatctaaatacaagtcacttcaacaaacggtgctgtcccatgaaccatcagtaaagtcagtgagagagaagggtgaagctcttttggaactggtgcaggacgtcactttaaaggacaaaatagatcaacttcaaagtgattaccaggacctgtgcagcataggaaaggagcatgtcttcagtctggaggcgaaagtcaaagaccatgaagactacaacagtgagctccaagaggtcgaaaagtggctgctgcagatgtctggcagactggtggcacctgacctcctggagacaagcagcctggagacaatcacccagcaattggcccaccacaaggcaatgatggaagaaattgctggttttgaagaccgtttgaacaatcttcaaatgaaaggtgatactttgattggccaatgtgcagaccacctgcaagcgaaacttaaacaaaacgtgcatgctcatctgcagggcacaaaggacagctactcagcgatctgcagcacagctcagaggatgtaccagagtttggaacacgaacttcagaagcacgtcagccgacaagacaccctgcagcagtgccaggcctggctttctgcagtccagccggatttagagccaagtcctcaaccacctcttagtagggcagaagccattaagcaggtcaaacacttcagagctttgcaagagcaggcaaggacctacctagatctcctttgctccatgtgtgacctgtcaaatgcttcggtgaaaaccacagcaaaagacattcaacaaacagagcaaacgattgaacaaaagcttgtccaggcccagaacttaactcagggctgggaagagatcaagcacctgaagtctgagctctggatttacctgcaagatgctgatcagcaactgcagaacatgaagaggaggcactctgagctggagctgaacattgcacagaacatggtttcacaagttaaggattttgttaagaaactacagagcaaacaggcatccgtgaacaccataatagaaaaggtgaataagttaacaaagaaggaggaatcgcctgaacacaaggaaataaatcatttaaatgatcagtggctcgatttgtgccgtcagtctaacaacctgtgcttgcaaagggaagaggatcttcagagaacaagagattaccatgactgtatgaatgttgttgaagtgttcctagaaaaatttactacagaatgggataacttggccagatctgatgcagagagtacagctgtccacctggaagctttgaaaaagttagcattggcattgcaggagagaaagtatgctattgaagatctgaaagatcaaaagcagaaaatgatagagcatctgaatttagatgacaaggagttagtcaaagaacagacgagtcatttagagcaacgttggtttcagcttgaggacctcattaaaaggaaaatccaagtgtcagtcaccaacttggaggagttaaatgtggtgcagtccagatttcaggagctaatggagtgggcagaagagcaacaacccaacatcgccgaggcccttaagcagagccctcctccagatatggctcagaaccttctcatggatcacctggccatctgcagtgaactggaggccaagcagatgctcctgaaatcgcttataaaggacgcagacagggtcatggcagatcttggtctcaatgagcgacaggtcatccagaaggctctctctgatgcacaaagccacgtgaattgtctcagtgacttagtgggccagcgaagaaagtacttaaacaaagccttgtccgagaaaacccagtttctcatggcagtgttccaggccaccagccaaattcagcaacatgagcgaaagataatgttccgtgaacacatctgtctgttaccagatgatgtgagcaaacaagtcaaaacatgtaagagtgcacaagccagcctcaagacttaccaaaatgaagtcactggactttgggcccagggtcgcgaactaatgaaggaagtcacagagcaggaaaagagtgaagtgctggggaagcttcaggaattgcagagtgtctatgacagtgttttacaaaagtgcagtcaccggttacaagaactagagaagaatttggtttctaggaagcattttaaggaagattttgataaagcttgccactggctaaaacaagcagatattgttacatttcctgaaatcaacctaatgaatgagagttctgagcttcatacacaactggctaaataccaaaacattcttgaacaatctccagaatatgaaaatcttctacttacgctgcagagaactgggcagaccatattaccatcgctgaatgaagtcgatcattcctacctcagtgaaaagctaaatgctttgcctcgacaatttaatgtaattgttgccttggctaaagacaagttctataaagtccaggaagcaattcttgctcggaaggaatatgcttccttgattgagttgacaacccagtctctgagtgaacttgaagcccaattcttgaggatgagcaaagttcccaccgacctggccgttgaggaggctctttctctgcaagatggttgcagagccattctggacgaggtggcgggccttggggaggcggtggatgaactgaaccagaaaaaagaaggttttcgcagcacaggtcagccttggcagccagacaagatgctgcaccttgtcaccttatatcacaggctgaagcgacaaacagaacagagggttagcttattagaagacaccaccagtgcttaccaagaacacgagaagatgtgccaacagctggagagacaactgaagtctgtaaaagaggagcagtccaaagtgaatgaggaaacgctgcctgcagaggagaagctcaaaatgtatcactccctggcaggaagtctccaggactcagggattgtactgaaacgagtaaccatacatcttgaagatcttgccccacaccttgaccccttggcttatgagaaagccaggcatcagatccagtcctggcaaggggagttaaaactgttgacttctgccattggtgagacggtgacagaatgtgagagccgaatggtgcagagtatagacttccagactgagatgagtcgctccctggactggctgaggagagtgaaggcagagctcagtgggccggtgtacctagacctcaacctgcaggacatccaagaggaaatcagaaaaatccaaattcatcaggaagaggtccagtccagcttgagaatcatgaatgcgctgagtcacaaggaaaaggagaagttcacaaaggccaaggagctgatttctgcggatttagaacacagcctcgctgagctctcagagctggatggagacatccaggaagccttacgcaccagacaggctaccttgactgaaatatatagccagtgtcaaaggtattatcaggtatttcaagcagccaatgactggcttgaggatgcccaagaattgttacagctggcaggcaatggcctagacgtggagagcgcagaggaaaatctcaaaagccacatggaatttttcagtacagaggatcagttccatagtaacctggaggagctccacagcctggtagccaccctggacccactcatcaagccaaccggcaaagaagacctagaacagaaagtggcttctctggaactcaggagccagaggatgagccgggactctggtgcccaagtggatctcttgcagagatgcacagctcaatggcacgattaccagaaagcaagggaagaggttattgaattgatgaatgatacagaaaagaaattgtctgagttttctttgttgaagacttcgtctagtcatgaagcggaagaaaaattgtcagaacacaaggctttagtgtcagtggttaactctttccatgagaaaattgtggcccttgaggaaaaagcttcacaactggagaaaaccggaaatgatgccagcaaagccaccctgagcaggtcaatgaccaccgtctggcagcgctggacacgccttcgagctgtggcccaggaccaggagaagatcctggaagatgcagtggatgagtggacgggctttaacaacaaggttaaaaaggccactgaaatgattgatcagctgcaagataagttacctggaagttcagcagagaaagcatcgaaagcagagctcttaactcttcttgaataccacgacacgttcgttctggagctggagcagcagcagtcggccttgggcatgctgcggcagcaaaccctgagcatgctccaggatggagccgccccaacccctggggaagagcctccgctcatgcaggaaatcaccgccatgcaagatcggtgcctgaacatgcaggagaaagtgaagactaatggaaagttggtgaagcaagagctgaaggaccgagaaatggtggagactcagatcaattctgtgaaatgttgggttcaggaaacgaaagaatatttagggaatccaacaatagaaatagatgctcaacttgaagaacttcagattctcctaacagaagccacaaatcaccgacagaacattgaaaaaatggcagaagaacagaaggagaagtacttaggtctttataccatattaccttctgaactctcccttcagttggctgaagtggcgttagatctaaagatccgagatcagatccaagacaaaataaaagaagttgagcagagcaaggccacgagccaggaactcagccggcaaattcagaagttagctaaagacctcacaactattctaactaagctgaaagcgaagacagataatgtagttcaagctaaaactgaccaaaaggtgctgggagaggaattagatggctgtaattcaaagttaatggaattagatgcagcagtacagaaattcttggaacagaatggccaactgggtaagccactggccaagaagataggaaaactgactgaacttcaccagcagaccattagacaagctgagaatcggctctccaagctcaatcaggcagcatcacatttagaagaatacaatgaaatgcttgaattaattttgaagtggattgaaaaagctaaagtcttggctcatggaactattgcatggaattctgcaagccagcttcgggaacaatatattttgcatcagaccctgctagaagaatccaaagaaattgacagtgagctggaagcaatgactgagaaattacagtacctcactagcgtgtactgtacagaaaaaatgtctcagcaagtggcagaactgggacgggagactgaggagttgcgacagatgatcaaaattcgtttgcagaacctccaagatgcagctaaggatatgaaaaaatttgaagcagagttgaaaaagttacaagctgccttggagcaagcccaggcaacactgacttctccagaagttggacgtctcagtctcaaggagcagctctctcatcggcagcatttgttgtctgagatggagtcactgaagccgaaggtgcaagcagtgcagctctgccagagtgccctccggatccccgaggatgtggttgccagcttacctctctgtcatgctgctctgcggctgcaggaagaggccagccggctgcagcacaccgccatccagcagtgtaacatcatgcaggcagctgtggtacaatatgaacaatatgagcaagaaatgaaacatctccagcaactgatagaaggagctcacagagagattgaggataaacctgttgccaccagtaacatacaggagctgcaggctcagatttctcggcatgaggagctggcgcagaaaattaagggctaccaggagcagatcgcttctttgaattccaagtgcaagatgctgacgatgaaagccaagcacgccaccatgctgctgacggtgaccgaggtcgaggggctggcggaagggacagaggacctggatggggagctcctccccacgccttcggcccacccctctgtggtcatgatgactgcaggtcgctgtcacactttgctgtcaccggtcactgaggagtctggggaggagggaaccaacagtgagatttcctctccacctgcctgtcgctccccttcacctgtggctaatacagatgcttctgttaaccaggacattgcatattaccaagccttgtctgctgagaggttgcagacagatgctgcaaaaattcaccccagcacatccgcatcccaggagttctatgaaccgggattggagccatccgctactgccaaactgggtgatttgcagcgttcttgggaaaccttaaagaatgtgatcagtgagaagcagcgcacactctatgaagctttggaacgccagcagaagtaccaggactccctccagtccatctctacgaagatggaggccattgagctgaaactcagtgagagcccagagcctggcaggagtccagaaagccagatggctgaacatcaggcattgatggatgagattctcatgctccaggatgaaatcaatgagctccagtcctctctcgcagaggagctggtatccgagtcttgtgaggccgaccctgcggagcagctggccttgcagtccacgctcactgtcttagccgagcgaatgtccaccatcaggatgaaagcctcggggaaacggcagcttttggaggagaagttgaatgatcagctggaggaacaaaggcaggaacaggccctgcagaggtatcgctgtgaagccgatgagctggacagctggctcttgagtaccaaggccactctggacactgcgctgagtccacccaaggagcccatggacatggaggcccagcttatggactgccagaatatgctggtggaaatagagcagaaggtggtggctttatcagaactgtcagtccacaatgagaacctgctgctggagggcaaagctcacaccaaggacgaggccgagcagctggctggaaagctgagaaggctcaaggggagcctgctggagctgcagagagccctgcatgataagcagctcaacatgcagggaacagcacaggagaaggaggagagcgatgttgacctaacagccacgcagagccccggcgtccaggaatggctggcccaagctcgcaccacatggacccagcagcggcagagcagtctccagcaacaaaaagagttagaacaggaattagccgagcagaagagtctccttcgctcagtagccagtcgtggagaggagattctaattcaacattcggcggcagagacctctggtgatgctggcgaaaaacctgatgtgttatcccaggagttggggatggaaggggagaaatcatccgctgaagaccagatgagaatgaaatgggaaagcctacatcaagaatttagtaccaagcagaaactactacagaatgttctggaacaggaacaagagcaagtgctttatagcaggccaaatcgactcttgtctggtgtgccactgtacaaaggggacgtgccaacccaagataaatctgcagttacatctttgctggatggactgaaccaagccttcgaggaggtttcatcccagagtggaggggcaaagaggcagagtatacacttggagcagaagttgtatgatggagtctcagccacctctacttggttggatgacgttgaagaacgtttatttgttgccacagcacttttaccagaagaaacagagacttgtctcttcaaccaagagattcttgccaaagacattaaggaaatgtctgaagaaatggataagaacaaaaacttgttttcccaagcttttccagagaatggtgataatcgagatgttattgaagatactttgggttgtcttttgggcaggttatccttgctagactcagtagtgaatcaacgatgtcatcagatgaaagaaagacttcagcaaatactaaatttccagaatgatctgaaagtgctgtttacatcactggctgacaacaaatacatcattctgcaaaaactggcaaatgtgtttgaacagcccgtagcagaacaaatagaggcaatacaacaggctgaagatggactcaaagaatttgatgcaggaatcattgaattaaagaggcgtggtgacaagctacaggtcgagcagccgtccatgcaagaactctccaagctccaggacatgtatgatgagctgatgatgatcattggctcccggaggagtggtctgaatcagaaccttacactcaagagtcagtatgagagggccctacaagatctggctgacctgctagaaactggtcaggagaagatggcaggagaccagaaaatcatcgtgtcttccaaagaggaaatccagcaactacttgacaaacataaggaatactttcagggcctggaatctcatatgatcttgactgaaacactcttcagaaagataatcagctttgcagtccaaaaggaaacccagttccatacagagctgatggctcaggcttctgctgtactgaaacgggctcacaagaggggtgtggagctggagtacattctagagacgtggtcccatctggatgaggaccagcaggagctcagcagacagctggaggtggtggaaagcagcatcccaagcgtgggtctggtggaggagaacgaggacaggcttattgaccgcataacactctaccagcatttaaaatctagccttaatgaataccagcccaaattatatcaagtattagatgatgggaaacgacttctgatatccatcagctgctcagatctagaaagccaactaaatcaacttggagagtgctggctaagtaacaccaataaaatgtctaaggaacttcacagactggaaacaatattgaaacactggaccagatatcaaagtgaatctgcagatctaattcactggttacaatctgcaaaagaccggctagaattttggactcagcaatctgtgacagtcccacaagagctggaaatggtccgtgatcatctaaatgctttcctggagttttctaaagaagtggatgcccaatcttccctgaaatcatctgttctgagtactggaaatcagctccttcgactaaaaaaggtggacacagccacgctgcgctctgagctgtcgcgcattgatagccagtggactgacctgctaaccaatatcccagccgtccaggagaagctccaccagctccagatggataaactgccttcccgccatgccatttctgaagtcatgagttggatttctctaatggaaaatgttattcagaaggatgaagataatattaaaaattccataggttacaaggcaattcatgaataccttcagaaatataagggttttaagatagacattaactgtaaacagctgacagtggattttgtgaaccagtccgtgctacaaatcagcagtcaggatgtggaaagtaagcgtagtgataagactgattttgctgagcaacttggagcaatgaataaaagttggcaaattctgcaaggtctagtaactgagaagatccagctgttggaaggcttattggaatcttggtcagaatatgaaaataatgtacaatgtctgaaaacatggtttgaaacccaggaaaagagactaaaacaacagcatcgaattggagatcaggcttctgttcaaaatgcactgaaagactgtcaggatctggaagatttgattaaagcaaaagaaaaagaagtagagaaaattgagcagaatggacttgctttgattcagaacaagaaagaagacgtctctagcattgtcatgagcacactgcgagagctcggccaaacctgggcaaatttagatcacatggttggacaattaaagatactgctgaaatcagtgcttgaccaatggagtagtcacaaagtggcctttgacaagataaacagttacctcatggaggccagatactctctttcccgattccgtctgctgactggctccttagaagctgtgcaagttcaggtggacaatcttcagaatctccaagatgatctggaaaaacaggaaaggagcttacagaaatttggctctatcaccaaccaattattaaaagagtgtcacccacccgtgacagaaactcttaccaatacactgaaagaagtcaacatgagatggaataacttgctggaagagattgctgagcagctacagtccagcaaggccctacttcagctttggcaaagatacaaggactactccaaacagtgtgcttcgacagttcagcagcaggaggatcgaaccaatgagctgttgaaggcagccacaaacaaggacattgccgatgatgaggttgccacatggattcaagattgcaacgacctcctcaaaggactgggcacagttaaagattccctcttttttctccatgagctgggagagcaactgaagcaacaagtggatgcttccgcagcatcagctattcaatcggatcaactctctttgagtcaacacttgtgtgccctggagcaagctctctgcaaacagcagacttcattacaggctggagttcttgattatgaaacctttgccaagagtttagaagctttggaggcctggatagtggaagctgaagaaatactacaagggcaggaccctagccactcatctgacctctccacaatccaggaaaggatggaagaacttaagggacagatgttaaaattcagcagcatggctccagatttagaccgtctaaatgagcttggatataggttacccttgaatgataaggaaatcaaaagaatgcagaatctgaaccgccattggtctctgatctcctctcagactacagaaagattcagcaagttgcagtcatttttgctacaacatcagactttcttggaaaaatgtgaaacatggatggaattcctagttcagacagaacaaaagttagcagtagagatttcaggaaattatcagcaccttttggaacagcagagagcacacgagttgtttcaagccgagatgttcagtcgtcagcagattttgcactcaatcattattgatgggcaacgtcttctagaacaaggtcaagttgatgacagggatgaattcaacctgaaattgacactcctcagtaatcaatggcagggagtgattcgcagggcccagcagaggcgggggatcattgacagccagattcgccagtggcagcgctatagggagatggcagaaaagcttcgtaaatggttggttgaagtgtcctacctccccatgagtggtctcggaagtgttcctataccactgcaacaagcaaggaccctctttgatgaagtgcagttcaaagaaaaagtgtttctgcggcaacaaggcagctacatcctgactgtggaggctggcaagcaactccttctctcggcggacagtggcgctgaggccgccttgcaggccgaactcgctgaaatccaagagaaatggaaatcagccagcatgcggctggaagaacagaagaaaaaactagccttcttgttgaaagactgggaaaaatgtgagaaaggaatagcagattccctggagaaactacgaactttcaaaaagaagctttcgcagtctctcccggatcaccatgaagagctccatgcagaacaaatgcgttgcaaggaattagaaaatgcagttgggagctggacagatgacttgacccagttgagcctgctgaaggacaccctctctgcctatatcagtgctgatgatatctccattcttaatgaacgcgtagagcttctgcaaaggcagtgggaagaactatgccaccagctctccttaaggcggcagcaaataggtgaaagattgaatgaatgggcagtcttcagtgaaaagaacaaggaactctgtgagtggttgactcaaatggaaagcaaagtttctcagaatggagacattctcattgaagaaatgatagagaagctcaagaaggattatcaagaggaaattgctattgctcaagagaacaaaatacagctccaacaaatgggagaacgacttgctaaagccagccatgaaagcaaagcatctgagattgaatacaagctgggaaaggtcaacgaccggtggcagcatctcctggacctcattgcagccagggtgaagaagctgaaggagaccctggtagccgtgcagcagcttgataagaacatgagcagcctgaggacctggctcgctcacatcgagtcagagctggccaagccaatagtctacgattcctgtaactcggaagaaatacagagaaagcttaatgagcagcaggagcttcagagagacatagagaagcacagtacaggtgttgcatctgtcctcaacctgtgtgaagtcctgctgcacgactgtgacgcctgtgccactgatgccgagtgtgactctatacagcaggctacgagaaacctggaccggcggtggagaaacatttgtgctatgtccatggaaaggaggctgaaaatcgaagagacgtggcgattgtggcagaaatttctggatgactattcacgttttgaagattggctgaagtcttcagaaaggacagctgcttttcccagctcttctggggtgatctatacagttgccaaggaagaactaaagaaatttgaggctttccagcgacaggtccacgagtgcctgacgcagctggaactgatcaacaagcagtaccgccgcctggccagggagaaccgcactgattcagcatgtagcctcaaacagatggttcacgaaggcaaccagagatgggacaacctgcaaaagcgtgtcacctccatcttgcgcagactcaagcattttattggccagcgtgaggagtttgagactgcgcgggacagcattctggtctggctcacagagatggatctgcagctcactaatattgaacatttttctgagtgtgatgttcaagctaaaataaagcaactcaaggccttccagcaggaaatttcactgaaccacaataagattgagcagataattgcccaaggagaacagctgatagaaaagagtgagcccttggatgcagcgatcatcgaggaggaactagatgagctccgacggtactgccaggaggtcttcgggcgtgtggaaagataccataagaaactgatccgcctgcctctcccagacgatgagcacgacctctcagacagggagctggagctggaagactctgcagctctgtcggacctgcactggcacgaccgctctgcagacagcctgctttctccacagccttcctccaatctctccctctcgctcgctcagcccctccggagcgagcggtcaggacgagacaccccggctagtgtggactccatccccctggagtgggatcacgactatgacctcagtcgggacctggagtctgcaatgtccagagctctgccctctgaggatgaagaaggtcaggatgacaaagatttctacctccggggagctgttggcttatcaggggaccacagtgccctagagtcacagatccgacaactgggcaaagccctggatgatagccgttttcagatacagcaaaccgaaaatatcattcgcagcaaaactcccacggggccggagctagacaccagctacaaaggctacatgaaactgctgggcgaatgcagtagcagtatagactccgtgaagagactggagcacaaactgaaggaggaagaggagagccttcctggctttgttaacctgcatagtaccgaaacccaaacggctggtgtgattgaccgatgggagcttctccaggcccaggcattgagcaaggagttgaggatgaagcagaacctccagaagtggcagcagtttaactcagacttgaacagcatctgggcctggctgggggacacggaggaggagttggaacagctccagcgtctggaactcagcactgacatccagaccatcgagctccagatcaaaaagctcaaggagctccagaaagctgtggaccaccgcaaagccatcatcctctccatcaatctctgcagccctgagttcacccaggctgacagcaaggagagccgggacctgcaggatcgcttgtcgcagatgaatgggcgctgggaccgagtgtgctctctgctggaggagtggcggggcctgctgcaggatgccctgatgcagtgccagggtttccatgaaatgagccatggtttgcttcttatgctggagaacattgacagaaggaaaaatgaaattgtccctattgattctaaccttgatgcagagatacttcaggaccatcacaaacagcttatgcaaataaagcatgagctgttggaatcccaactcagagtagcctctttgcaagacatgtcttgccaactactggtgaatgctgaaggaacagactgtttagaagccaaagaaaaagtccatgttattggaaatcggctcaaacttctcttgaaggaggtcagtcgtcatatcaaggaactggagaagttattagacgtgtcaagtagtcagcaggatttgtcttcctggtcttctgctgatgaactggacacctcagggtctgtgagtcccacatcaggaaggagcaccccaaacagacagaaaacgccacgaggcaagtgtagtctctcacagcctggaccctctgtcagcagtccacatagcaggtccacaaaaggtggctccgattcctccctttctgagccagggccaggtcggtccggccgcggcttcctgttcagagtcctccgagcagctcttccccttcagcttctcctgctcctcctcatcgggcttgcctgccttgtaccaatgtcagaggaagactacagctgtgccctctccaacaactttgcccggtcattccaccccatgctcagatacacgaatggccctcctccactctgaactaagcagatgccatctgcagaagtgctggtagcataaggaggatcgggtcataagcaatcccaaactaccaacaagaggaccttgatcttggcgaaagccctcggtgtggcagctttagccctcctccagatcacatgtgtgcaaattatggcttcagaggtggaagataaacagtgacgggggaacaaacagacaacaagaaggtttggaagaaatctggtttgagactctgaaccttagcactaaggagattgagtaaggacctccaaagttccccggactcatgaattctgggcccttggcccattctgtgcacagccaaggacttcagtagaccatctgggcagctttcccatggtgctgctccaaccatcagataaatgaccctcccaagcaccatgtcagtgtcgtacaatctaccaaccaaccagtgctgaagagattttagaaccttgtaacatacaatttttaagagcttatatggcagcttcctttttaccttgttttcctttggggcatgatgttttaacctttgctttagaagcacaagctgtaaatctaaaaggcacttttttttagaggtataaagaaaaactagatgtaataaataagatcatggaaggctttatgtgaaaaaagttgaatgttatagtaaaaaaaaaaagatatttatgtatgtacagtttgctaaagccaagttttgtttgtattgatttctttgcatttattatagatattataaaata

SEQ ID NO: 424 - DNA, 14734 bp, HOMO SAPIENS
gaggctttcgactgagggctagcgaggggagcacggctggagcagggctggagcagggctggagcagggctggagcagggctgaagcagggccgcggaccccgcacgctcctgcgggccccgcggagccattgcggccgaggcctcggcaggcgccagcggagagctagccgcatcttcgggggcagcccggcagctgccggcggcgcggcgagagagcggctgacagaggggatgcgaggtcctccagcagcctgacctgagtgggttagtgatccagagaaaccagcaggccaacttggtcaggaaggttcgggaagctgttggagcagtgtggggaatttcccaccaggatgagtatgattggctgtgattttagatcgtaaagctgaaaattgaaatcatgaaagtagacaggactaaactgaagaagacacctactgaggctcctgcagactgcagagccttaatagacaaactcaaagtttgtaatgatgagcaacttctcttggaactgcagcagatcaaaacatggaacattggaaagtgcgagttatatcactgggtggacctgttggaccgcttcgatggaatactggcagatgctggacagacagtggagaatatgtcatggatgctcgtatgtgataggccagaaagagagcaactgaaaatgcttctcttggctgtgttgaacttcacagccttgctcattgagtacagcttttcccggcatctgtacagttccatagagcatttgacaactttattggcttcctctgatatgcaagtggtgctggcagtcctcaatctcctatatgtatttagcaaaagatcaaactacatcactcgtctgggatctgacaagaggaccccgctgctaactcggctacaacatttggcagagagctggggtggaaaggagaatggctttggacttgcagaatgttgcagagacttgcatatgatgaaatatccacccagtgcaactacactacactttgaattctatgcagatcctggggccgaggtcaaaattgagaaaaggacaactagtaacacactacattatattcacatagagcaacttgacaagatttcagaaagcccttctgaaatcatggaatctcttaccaaaatgtacagcattcctaaggataagcagatgctgttatttacacacatacgactggcccatggcttttctaatcacaggaagcgattgcaggcagttcaggccagactgcatgcaatatctatattagtgtattccaatgccttgcaggaatcagcaaacagtatcttgtataatggcttgatagaggagttggtagatgtccttcagataacggataagcagcttatggagattaaagcagcttctttacgaacattaacatcaattgtccacttggagagaactcccaaactcagcagtattattgactgtactggaactgcctcctaccatggatttttgccagtgcttgtaaggaactgtatccaggccatgattgatccttccatggatccataccctcaccagtttgccactgctctcttctcttttttataccatctggccagctacgatgctggtggtgaagccttggtctcctgtggaatgatggaagccttattgaaggtcataaagtttcttggcgatgaacaggaccagataacatttgtcaccagagccgtcagagtggttgaccttatcaccaacctggatatggcagcttttcaatcccatagtggactttctatcttcatttatagacttgagcatgaagtagatttgtgccgaaaagaatgtccgtttgtgatcaagccaaagatccagagacccaatactacacaagaaggagaggaaatggaaactgatatggatggagtccagtgtattccacaacgagcagcacttctgaaatccatgttgaatttcctcaagaaggccatccaagaccctgctttctcagatggcatacgacatgtgatggatggttctctgcctacctccctgaaacacatcatcagcaatgcagaatactatggcccatcactcttcctcctagctactgaagtggtgactgtgtttgtatttcaagaaccatcactgctctcctcactccaggacaatggattgacagatgtcatgctgcatgcactgcttatcaaagatgttcctgctacccgtgaagtccttggctccctcccaaatgtattcagtgcactctgtttgaatgcccgaggtcttcagtcttttgttcagtgtcagccttttgaacgcctcttcaaagttcttctgtctccagattacctcccagccatgcggaggaggagaagttctgatccccttggggatactgcatccaacctggggagtgctgtcgatgagctcatgagacatcagcccacccttaaaacagatgcaacgactgccatcatcaagttacttgaagaaatctgtaatcttggaagggaccccaaatacatctgtcagaagccatcaatccagaaggcagatggcactgccactgctcctcccccaaggtctaatcatgccgcagaagaagcctctagtgaggatgaggaggaagaggaagtacaggccatgcagagctttaattctacccagcaaaatgaaactgagcctaatcagcaggttgttggtacagaggaacgtattcctattcccctcatggattacatccttaatgtgatgaaatttgtggaatctattctgagcaacaatacaacagatgaccactgccaggaatttgtgaatcagaaaggactgttgcctttggttaccattttgggtcttcccaatctgcccattgactttcccacatctgctgcctgtcaggctgttgcaggtgtctgcaaatccatattgacactgtcacatgaacccaaagtccttcaagagggtctccttcagttggactccatcctctcctccctggagcccttacaccgccccattgaatcccctgggggctcagtgttgttgcgagaactggcttgcgcaggcaatgttgctgatgctaccctctcagcccaggccacacctctgctgcatgcactcactgctgcccatgcctacatcatgatgtttgttcatacttgcagagttggacagagtgaaattcgttccatctccgtaaaccagtggggctctcaattgggtctgagtgttttgagcaagctgagccagttatactgttccctggtgtgggaaagcactgtcctcctctctctgtgtaccccaaacagcctaccatctgggtgtgaatttggccaggcagatatgcagaaactggttccaaaggatgagaaggcaggtacgacccagggcggaaaaagatcagatggggaacaggatggagcagctggaagtatggatgcttctacccagggcttattagaaggcattgggctagatggtgacacattggctcccatggagacagatgaacctactgcttcagactctaagggcaaatctaaaatcacaccagcaatggctgccagaattaagcaaatcaagcctttgttatcagcttcctccagattaggccgagcacttgctgagctatttggacttcttgttaaactttgtgtgggatctcctgtccgccagagaaggagccatcatgctgccagcaccactacagcaccgacacctgccgcgcgatcaacagcctcagctctcactaagctcttgactaaggggttatcttggcagcccccaccatatacacctactccccgattcaggctgacattcttcatctgttcagttggtttcacatccccaatgctgtttgatgagaggaagtatccctaccacctcatgctgcaaaaatttctctgctccggaggccacaatgctctttttgaaactttcaactgggctctgtccatgggaggtaaagttcctgtttctgagggattggaacactcagacttgcctgatggcacaggagaattcctagatgcctggcttatgctggtggagaagatggtgaatcccaccacggtgcttgaatctccacattcgctgcctgccaaattgcctggaggtgtccagaactttccccagttcagtgcactgcgcttccttgtggtaactcagaaagcagcctttacttgcatcaaaaacttatggaaccggaaacccctgaaggtatatggtggacgaatggctgaatcgatgctggccattctatgccacatcctccgaggagaacctgtgattcgagagagactaagcaaggagaaggaggggtctcgaggagaagaggatacagggcaagaggaaggtggctcccgccgggaacctcaagtcaaccagcaacaactgcaacagctcatggacatgggcttcacaagggaacatgcaatggaggcactgttgaacaccagcaccatggagcaggccacagagtaccttttaacccaccctcctccaatcatgggaggagttgttcgggatctcagcatgtctgaagaggaccagatgatgagagcaattgctatgtctctgggacaggatattccaatggatcaaagggcagagtcacctgaggaagttgcttgccggaaggaggaagaggaacggaaagctcgggaaaagcaggaggaggaagaggctaaatgtctagagaagttccaggatgctgacccgttggaacaagatgagctccacactttcacagatactatgttgccaggctgcttccaccttcttgatgagctgccagacacagtataccgtgtgtgtgacctgatcatgacagcaatcaaacgtaatggagcagattatcgtgacatgattctgaagcaagtagtcaatcaggtgtgggaagctgctgatgtattgatcaaagctgctcttcccctgacaacaagtgacacaaaaaccgtgtcagagtggataagtcagatggccacactgccccaggcctccaatttggctactagaatcttgcttttaacgctactttttgaggagttgaagctaccttgtgcttgggtggttgaatcaagtggcatccttaatgtcctaatcaaactcttggaagtggttcagccctgcctccaggcagccaaggagcagaaggaagtccagaccccaaagtggatcacaccagtgttgctcctgattgatttctatgaaaagacagccatctcctcaaaaaggagagcccagatgactaagtacctgcaatccaacagcaacaactggcgctggtttgatgatcgctctgggcgttggtgtagttacagtgcaagcaacaatagcactattgattctgcctggaaatctggagagacaagcgtgcgattcactgcaggccgaagaagatacacggtccaattcactacaatggtgcaggttaatgaggaaacagggaaccgacgccctgtgatgctgactctcctcagggtacctcggctgaataaaaattcaaaaaacagcaatggacaggaactagagaagacgctggaagaaagcaaagaaatggatatcaaacgtaaagaaaataaaggcaatgatacccctttggccctagagagtacaaacactgaaaaggagacaagcctggaggaaacaaaaatcggggagatcctgatccagggcttgacagaagatatggtgactgttttaatccgggcctgcgtgagcatgctgggagtccctgtggacccagatactttgcatgccacccttcgtctctgtctgaggctcacccgggaccacaaatatgccatgatgtttgcagaactgaagagtacccgcatgatcttgaatttgacccagagctcaggcttcaatgggtttactcccctggtcacccttctcttaagacacatcattgaggacccctgtacccttcgtcataccatggaaaaggttgttcgctcagcagctacaagtggagctggtagcactacctctggtgttgtgtctggcagcctcggctctcgggagatcaactacatccttcgtgtccttgggccagccgcatgccgcaatccagacatattcacagaagtggccaactgctgtatccgcatcgcccttcctgcccctcgaggctcaggaactgcttcagatgatgaatttgagaatcttagaattaaaggccctaatgctgtacagctggtgaagaccacccctttgaagccctcacctctgcctgtcatccctgatactatcaaggaagtgatctatgatatgctgaatgctctggctgcataccatgctccagaggaagcagataaatctgatcctaaacctggggttatgacccaagaggttggccagctcctgcaagacatgggtgatgatgtataccagcagtaccggtcacttacgcgtcagagcagtgactttgatacgcagtcaggtttttccattaatagtcaggtctttgctgcagatggtgcctccactgagacttccgcatctgggacctcccaaggagaggcttcaactccagaggagtctcgagatgggaagaaagataaagaaggggaccgggcctctgaggaaggcaaacagaaaggcaagggcagcaaacctttaatgcctacctccactatccttcgtcttctggcagagttggtgaggtcctatgttggtattgctaccctgattgccaactacagctacactgtgggccagtctgaactgatcaaagaggactgcagtgtgctagcttttgttctggaccacctgctcccacatacccagaatgcagaagacaaggacacccctgccttggcccgcctgttcctcgcaagcctggctgctgcagggagtggcacagatgcccaggtggccctagtgaatgaagtaaaagcagcccttggacgggcactggctatggctgagagtacagagaaacatgccaggcttcaggcagtgatgtgtatcatcagtactatcatggagtcctgcccctccacctccagcttctacagcagtgccacagcgaagacccagcacaatggcatgaacaacatcattcggcttttcctgaagaagggactggttaatgacctggccagagtacctcacagcttagacctgtccagtcccaacatggccaacacagtcaatgctgctctgaagcctttggaaacactttcccggattgtgaaccagcccagtagcctttttggcagcaagagtgcttctagcaagaacaagtctgagcaggatgcccaaggagcctctcaagattccagtagcaaccagcaggacccaggcgagcctggggaagcagaagtgcaggaggaggatcatgatgtcactcagacagaggtggcagatggggatatcatggatggggaggctgaaaccgactcagtggtgattgctgggcagcctgaggtgctcagttcacaagagatgcaggttgagaatgagctggaggacctgatagatgagttgcttgagagggatggcggatctgggaacagtacaattatagtgagcagaagtggagaggatgaatcacaagaggacgtgctgatggatgaagctccttccaacctcagccaagcttccaccttgcaggccaaccgagaagattccatgaatatcctggaccctgaggatgaggaggagcacactcaggaagaggacagcagtggcagtaacgaggatgaggatgatagtcaggatgaagaggaggaggaggaggaagatgaggaagatgatcaggaggatgatgaaggtgaagagggagatgaagacgatgacgacgatggctctgagatggaattggatgaggattatcctgatatgaacgcttctcccttggtccgatttgagcgctttgaccgggaggatgatctcatcattgagtttgacaacatgttctccagtgctacagacatccccccatccccaggaaatatccctaccacccatccactgatggtgcgccatgcagaccacagttctctgacactgggcagtggctcttcaacaactcgtctcacccagggcatcgggcgcagtcagaggaccctaaggcagctgacggccaatactggccacaccattcatgttcactaccctgggaatcgccagcccaaccctcctcttatactgcagaggttgcttggtccctcagctgctgctgacatccttcagctgagcagcagccttcccctacaaagccggggtcgggcccgcctcctggtaggcaacgatgacgtccacatcatcgcccgttctgatgatgagctgctggatgactttttccatgatcagagcacagctaccagccaagcaggaaccctgtccagcatccccacagccctgacccgctggacagaagaatgcaaagttctcgatgctgagagcatgcatgactgtgtttcagtggttaaagtgtccattgtcaatcacctggaattcctgagggatgaggagctggaagaaaggcgagagaagcgcaggaaacaactggctgaggaagaaacaaagataactgataaaggcaaagaagataaggagaacagggatcagagtgcacagtgtactgcatctaagtcaaatgactccactgaacagaatctctcagatgggacgcctatgcctgacagctacccaacaaccccatcttcaactgatgcagctacatctgagtccaaggagacccttggcactctgcaatcctcacaacagcaaccaacactcccaaccccaccagctttgggagaggttcctcaggagctgcagtctccagctggagaagggggcagctctacacagctattgatgcctgtagagccagaggaattgggtcccacaaggccaagtggggaagcagaaacaactcagatggagttatccccagctcccactataacctcactttccccagagagagctgaggattctgatgcactgacggctgtcagcagtcagctagaaggctctcctatggatacaagcagcctggcttcctgtaccttagaggaggctgtgggtgacacttcagcagctggcagttctgagcagcccagagcaggcagctccactcctggggatgccccaccagctgtggcggaagtgcaaggcaggagtgatgggtcaggggaatctgcccagccacctgaggacagctccccacctgcatcctctgagagctcttccaccagagattctgccgtggccatttctggagcagattcccgaggaatcctagaagagccgttgccttcaacaagcagtgaagaagaagatccccttgcgggtatcagtctccctgaaggtgtggacccctcttttctggctgccctgcctgatgacatccgtcgggaagttctacagaaccagctaggcattcgtccaccaacccggactgccccctccacaaatagctcagcgcctgcagtggtggggaatcctggtgtgactgaagtgagccctgagtttctggctgccctgcctccagccattcaggaggaagtactggcacagcagagagctgagcagcagcgacgagaactagcacagaatgccagctcagacacccctatggaccctgtgaccttcatccagactctgccctcagacctgcgccgtagtgtcctagaggatatggaggacagtgtgttagctgtgatgccacctgacattgcagctgaggctcaagccctgagacgagagcaagaagcccggcagcgacagctcatgcatgagcgtctgtttgggcacagtagcacctccgcactctctgctattctccgaagcccggctttcaccagtcgcttaagtggcaaccgtggggtccagtatactcgccttgctgtgcagagaggtggcaccttccagatggggggtagcagcagccataacaggccttctggcagtaatgtagatactctcctccgcctccgaggacggctccttctggaccacgaagccctttcttgtctcttggtcctactttttgtggatgagccaaagctcaatactagccgtctacaccgagtactgagaaatctctgctaccatgcccagacccgccactgggtcatccgcagtctgctctccatcttgcagcgcagcagtgagagtgagctatgcattgaaacacccaaactcactacaagtgaggaaaagggcaaaaagtcgagcaagagctgtgggtcaagtagccatgagaaccgtcccctggacctgctacacaagatggagtcaaagagctccaaccagctttcctggctctcagtatccatggatgcagccctaggctgcaggactaatatatttcagatccagcgttcaggggggcgtaaacataccgagaagcatgcaagcggtggctccaccgtccacatccatccccaagctgctcctgttgtctgcagacacgttttggatacactcattcaattggccaaggtatttcccagccacttcacacagcagcggaccaaagaaacaaactgtgagagtgatcgggaaaggggcaataaggcctgtagcccatgctcctcacagtcctccagcagtggcatttgcacagacttctgggacttattggtaaaactggacaacatgaatgtcagccggaaaggcaagaactccgtgaagtcagtgccagtgagcgctggcggtgagggggaaacctctccatacagcctcgaggcctctccactggggcagctcatgaacatgttgtcacacccagtcatccgccggagctctctcttaactgagaaactcctcagactcctttctctcatctcaattgctctcccagaaaacaaggtgtcagaagcacaggctaattctggcagcggtgcttcctccaccaccactgccacctcaaccacatctaccaccaccaccactgccgcctccaccacgcccacaccccctactgcacccacccctgtcacttctgctccagccctggttgctgccacggctatttccaccattgtcgtagctgcttcgaccacagtgactacccccacgactgctaccactactgtttcaatttctcccactactaagggcagcaaatctccagcgaaggtgagtgatgggggcagcagcagtacagactttaagatggtgtcctctggcctcactgaaaaccagctacagctctctgtagaggtgttgacatcccactcttgttctgaggaaggcttagaggatgcagccaacgtactactgcagctctcccggggggactctgggacccgggacactgttctcaagctgctactgaatggagcccgccatctgggttataccctttgtaaacaaataggtaccctgctggccgagctgcgggaatacaacctcgagcagcagcggcgagcccaatgtgaaaccctctctcctgatggcctgcctgaggagcagccacagaccaccaagctgaagggcaaaatgcagagcaggtttgacatggctgagaatgtggtaattgtggcatctcagaagcgacctttgggtggccgggagctccagctgccttctatgtccatgttgacatccaagacatctacccagaagttcttcttgagggtactacaggtcatcatccagctccgggacgacacgcgccgggctaacaagaaagccaagcagacaggcaggctaggttcctccggtttaggctcagctagcagcatccaggcagctgttcggcagctggaggctgaggctgatgccattatacaaatggtacgtgagggtcaaagggcgcggagacagcaacaagcagcaacgtcggagtctagccagtcagaggcgtctgtccggagggaggaatcacccatggatgtggaccagccatctcccagtgctcaagatactcaatccattgcctccgatggaaccccacagggggagaaggaaaaggaagaaagaccacctgagttacccctgctcagcgagcagctgagtttggacgagctgtgggacatgcttggggagtgtctaaaggaactagaggaatcccatgaccagcatgcggtgctagtgctacagcctgctgtcgaggccttctttctggtccatgccacagagcgggagagcaagcctcctgtccgagacacccgtgagagccagctggcacacatcaaggacgagcctcctccactctcccctgcccccttaaccccagccacgccttcctcccttgacccattcttctcccgggagccctcatctatgcacatctcctcaagcctgccccctgacacacagaagttccttcgctttgcagagactcaccgcactgtgttaaaccagatcctacggcagtccacgacccaccttgctgatgggccttttgctgtcctggtagactacattcgtgtcctcgactttgatgtcaagcgcaaatatttccgccaagagctggagcgtttagatgaggggctccggaaagaagacatggctgtgcatgtccgtcgtgaccatgtgtttgaagactcctatcgtgagctgcatcgcaaatcccccgaagaaatgaagaatcgattgtatatagtatttgaaggagaagaagggcaggatgctggtgggctcctgcgggagtggtatatgatcatctctcgagagatgtttaaccctatgtatgccttgttccgtacctcacctggtgatcgagtcacctacaccatcaatccatcttcccactgcaaccccaaccacctcagctacttcaagtttgtcggacgcattgtggccaaagctgtatatgacaaccgtcttctggagtgctactttactcgatccttttacaaacacatcttgggcaagtcagtcagatatacagatatggagagtgaagattaccacttctaccaaggtctggtttatctgctggaaaatgatgtctccacactaggctatgacctcaccttcagcactgaggtccaagagtttggagtttgtgaagttcgtgacctcaaacccaatggggccaacatcttggtaacagaggagaataagaaggagtatgtacacctggtatgccagatgagaatgacaggagccatccgcaagcagttggcggctttcttagaaggcttctatgagatcattccaaagcgcctcatttccatcttcactgagcaggagttagagctgcttatatcaggactgcccaccattgacatcgatgatctgaaatccaacactgaataccacaagtaccagtccaactctattcagatccagtggttctggagagcattgcgttctttcgatcaagctgaccgtgccaagttcctccagtttgtcacgggtacttccaaggtacccctgcaaggctttgctgccctcgaaggcatgaatggcattcagaagtttcagatccatcgagatgacaggtccacagatcgcctgccttcagctcacacatgttttaatcagctggatctgcctgcctatgagagctttgagaagctccgccacatgctactgttggctatccaggagtgctctgaaggctttgggctggcctaataaggccctgcccaactccgtggggttttttttaccattgttggacctggggaggggggagttaaaaaaagaaccagaaagaaattgtcaaaaaccaataaatgaaatccaccaactcaccgtgtgtgtcccagctgccccatcttccccagcgcatacctgttcctcttctcattctctccccgccgcctgtttcctcaccttctctcccctttccatgccgtccatgatccccaccccatgtgttttaaaaaggcagtagcctttgcagggacctgtctgtcccaactgtttgaacagtgtgctcctcagattctgtgttcagaaggatttgctgcattgagacttgaaacctttggataggggaaaaaattatatatatatatatttttttgttctgtttgcatttcttaatttgtgcttggaatgtgttgatgtgcacagctaatgattcaatgcgagacaagattggcgtctgtgttgtggaggtttcaaataaagagcactcttcataactcacttttcacaatggagtttttttcaaacttaaaaaaaaaaacaaaaaactcttaagcacatgctaggcatctggagaaaagatggattctccaggaaaccatccctgccctacccgcttgcccacctgcctccaccactggtgcaacttcctccttcagagtcagtttctgcagtcaggagagatgagcagttcaccaggaattgggggtgggggcatctgttttttttttttagaatgggagctgcacttggggatggtgatggtgttagagattgcagcccaggacaaagcatcaccttgctcaaggggaacaaactgcagcaggttgtacaaaacattcagagagctcacttgacccaaccgagggttttacttggtgagcctttctagtagtcttgagtctggggctcagttttagatttttatttcattaatgtttgtttatttctaataaattttaataagcgagtaatttaactaggtcgccagaagaccattatttttgtttgtctatttttgttgtcgtcactccctctctcgtcatctgtctgccagtctgttcacagatcaccttgtagtcccttgtggtttttactccatccagtgcttaaagctgatctaaggacttcgatggttccagccttcaaagaaaaaataatttaataaaaatttagttagaaaaaataa

SEQ ID NO: 425 - DNA, 1843 bp, HOMO SAPIENS
attctcctctggacctcaccactctcagagctgcttgtcctggcagaatctacagttcaccccaactctatgccttacccctcccaacccaacagcatttgcagtttgcaaaatatacagacccaagtcctgaggggactgaggacatgatgctgggcccaagtctcctgctcagggcttctctccaatgccagccctgccactccttcctcaccctccttggagcctcctctgctgcttgtctatcccaacggccctgctcccctcccttcctgcccttcaccagctttctggacaccatgccctgaggaagggacctttggttttctctaaacatctttgaagggctgaggcagtcagggctggctgccttgtcactctttatttggaagccactcaaaccattcccaagaagagggacctcagctggcaatctggaaacctggcccaggtctgggcagatgtcttcacttctcctaccttcccagtcttgtgatcctgtgatgagcaccaggatggccctgtggtccctagagcacccctcatgctgtagggtcctgcagccccatcctttctctactgggccctggtatcctggctcctctctcagctctgccactgatctctgtgccttagtttacttctctgcacgggggactcaccccaagaccatttccagcagcttcccaggtgatgtggtgccccaaggctgggctttgccagctgtggcccagctccttagtgctgcccaggagacaccaggctgctcagaatgaggtgactgcgggcaccattctcagccagtggttcttgtattgcattccagcagcaggaatatcacctgggaacttgatagaagtgcagattagcagccccacccaagacccactgaattagagcttgtggagtggggccctacaagctggggttttaaggagccctccaaatgattctgacgcataagaatatgccaactgctgatctgggctagccattagtagagcctggggagggactgggactggctaggccaagaacaggtggaaaacaccagccttatctggactcctgagattgggaaccaccaccaacaaaaaccaaccctatagtcgctcctcttggaagaggaagagaagttgaagggcctggagaaagcacacattgtttgtttccctgctcctgctcacctctctcacttgtcttggttttacaaaaggctgtgtggatggtgccagccagggagggggtgggagtcctggggaggcaggaggcagaagaccctgactgtttctcccttgggaacctcaccataggccagatagcgcctcttcaaactgaaagaaatcttaactccacaaagaaagcatcctaaatccccagttcctcctcctcccaaccccagggataccttgtagacagtgccaaaaaacagctccaacccccagcagctgggaagagagccagaagctgcccttcctcctcatcctggcccctccccagcccccgccaatactgtgaacccccttcccactcagcctggtttcctggtgagggtcctgcagtcatgggccctgggggacccccagggcaaggcccatgggagggaagggaccaagggcatccttgggccaactgtccacctctcttgtccactattctctcctttccacttctgtcttcaaaaggctccttcctaggatggatcgggtgctaggacaactgcagtccaatccaccagctctccctgcccctgtgtcttatttcagacatgagaataactgtacagtgtaaacttataaagcgtttttaatggttgtagattggaaataaagtatgtcatatg

SEQ ID NO: 426 - DNA, 25 bp, HOMO SAPIENS
ccgtcgtcaccctggtgtaccttga

SEQ ID NO: 427 - DNA, 5801 bp, HOMO SAPIENS
atatgaccggcagccggcggctccggcgccgagcagagttactcagtcgcagcggccccgcgctcccgcaaggctgggcggccgcgccgccgcgatggccccgccaccgcggccgccgcccccggctgcgcgctgagccgccggccccccgagcgccacggccggagctgcggcggcggcatcatggccccgaccctgctccagaagctcttcaacaaaaggggcagcagcggcagctccgcggcggcgtctgcccagggcagggctcctaaggaaggacccgcctttagttggtcatgttcggagtttgacctgaatgagattcgcctgatagtttaccaggactgtgacaggagaggcagacaagtcttgtttgactctaaagctgttcaaaagattgaggaggtgacagctcagaaaacagaggatgttcctattaaaatatcagccaagtgctgccagggaagcagcagtgtcagcagcagtagcagcagcagcatctcttcccacagttcttctgggggatcttcacatcatgctaaggaacagcttccaaagtaccagtacacaagaccagcttccgatgtcaacatgttaggggaaatgatgtttggctcagttgccatgagttacaaaggctccaccttaaagatacactacatacgttctcctccacaactgatgattagtaaagtcttctctgctagaatgggcagcttctgtggaagtacaaataacttgcaagacagctttgagtacatcaaccaagatcctaatttgggaaaactgaacacaaatcaaaatagtttgggtccttgtcgtactggaagtaacctagcacacagcacaccagttgatatgccaagcagaggacagaatgaagacagggacagtggcattgctcgatcagcctcactaagcagtcttttgatcacacctttcccatctccaagctcctctacatcttcttccagcagttaccagcgccgctggcttcgaagtcagacaacaagtttggaaaatggcatcatcccaagaaggtcaactgatgagacattcagcttggctgaagaaacctgtagctctaatccagctatggttaggaggaagaaaattgccataagcatcatcttttccctatgtgagaaagaagaagcacaaaggaatttccaggacttcttcttttctcattttcccctgtttgaatctcacatgaacaggctgaagagtgcaattgaaaaggctatgatctcctgtaggaaaatagcagaatcaagtctccgagtccagttttatgtcagccgtttgatggaagctctgggagaattcagaggaactatctggaacttatattctgttccaaggatagctgaacctgtatggcttactatgatgtccggcactttggaaaaaaaccagctctgccagcgctttctcaaggagtttacacttctgatagaacagataaataaaaaccagttttttgctgccttactgactgcggtgttaacctaccacctggcctgggtcccaactgtcatgcctgtggatcaccctcccatcaaagccttctcagagaaacgtacctcccagtcagtgaacatgctggccaaaacacatccgtataatcctctttgggcacagctgggtgatctttacggagccataggctctccagtgagactgactcgcaccgtagtggtagggaagcagaaggacttagtccagcgaatactttatgtcctgacctactttctccgttgctctgagctacaagagaaccagctgacctggagtggcaatcatggtgaaggtgaccaagttttaaatgggagcaagatcataacagccttggagaaaggagaggtggaggagtctgagtatgtggtcattacggtgaggaacgagcccgctcttgtaccccccatcctaccaccaacagcagcagagagacacaacccctggccgacagggtttcctgagtgcccagagggcactgacagtagagacctgggtcttaaacctgacaaagaagctaacaggaggccagagcagggttctgaggcttgcagcgcagggtgcctggggccagcatcagacgcttcctggaaacctcagaatgcattttgtggggatgagaaaaataaagaggcaccgcaagatggctcttcaagacttcccagctgtgaagttttgggggcaggaatgaagatggaccagcaagctgtctgtgagctgttgaaagtggagatgcctacaagactgccagaccggtcagtggcctggccttgccctgacagacatctccgggagaaaccttccttagaaaaggtcactttccagattggaagctttgcatctccagagtctgactttgaaagccgcatgaaaaaaatggaggaacgggtgaaggcctgtggcccctccttggaggccagtgaggctgctgatgtggctcaggacccgcaggtttctaggagcccttttaaacctggctttcaggagaatgtttgctgtcctcagaatcggctttcagagggggatgaaggcgagtctgacaagggttttgcagaggacagaggcagcagaaacgacatggcagcagatattgctgggcagctcagccacgctgctgacttgggcacagcctcccacggtgcaggaggaacgggagggaggaggctggaggccactagaggtttgtatgtgaaggctgcggaaggacctgtgctggagcctgttgcccccaggtgtgtccagcggggccctggcctcgtggctggtgcgaatatcccctgtggggatgacaacaagaaggccaacttcaggactgaaggagacattccccgaaatgaaagctcagatagcgccctgggagacagtgacgacgaagcctgcgcttcagccatgctagatctgggtcacggtggtgacaggactggagggtccttggaagtggagctgcctctgccaaggtctcagagcatcagcacccagaatgtaaggaactttggccgctcacttctggcgggctactgccccacatacatgcctgatcttgtgcttcatgggaccggcagtgatgagaagctgaagcagtgcctggtggccgaccttgtccacacagtccatcatccagtcctggatgagccaatagctgaagctgtctgtattatcgcagacacggataaatggagtgtgcaggtagctacaagtcagaggaaagtgacggacaacatgaaactaggccaggatgtcctggtctctagtcaggtgtccagtttgcttcagtccattttacagctctataagcttcacctccctgctgatttttgcatcatgcatcttgaagatagactacaggagatgtaccttaaaagtaaaatgctatctgaatatctccggggacacacacgagtccatgtgaaagaattaggtgtcgtactggggattgaatccaacgacctgcctctgttgactgctattgccagtactcattctccttatgtggctcaaatactcttataagctaaagctcaggacagttcttccttggaagaaaaaaatcaaattctcaactgaaggagaaaggaataagctctctgtgatgtcaaaagcatgagaagagcaaacagaaacagtcattccacctttttgttttgtgtttttgctgtcaagctgatgcttcattgaagacttaggtttacttgacataatagcatttgtgattgtcgtgaacactttaggccatttgttacccatgaatcaacaaagaaactgacctttttggtaggaggaaacataagcactaaacactaagctgttgcaacagattgccttgtgctgtttgggcagaataaagacaagtgacttgagcggggtggtcagcagtgtacataatattccagtaggaaactgcttccaagtttaagcatgagctccccaaactggagaaaacatattttgctattctgagacaacaatcagaatacagactttggattccaggtcacagtttgctttttagacaaggtaaagcaaagaaagccacattgtgccatcttcagctccagtggctttagcagtgactgtttgacataaaacatgtaagaattgcttgttgggaagagtgctttagggacccactgttttcatttcttcttggagtttaccttgtttcagatgcagccatgggtaggtcagagatggattgttggtgcaataaacccaagaatcaatgtagcctcttaatcccatcaagatgtagtttgtagcagcaaagtgtacagtctgaaaccgtatgttttatccttatattttagagctttcagcagcctttttaagagaggccacttaccaaagttatttctataagctcaagagtgtttcggttggtaagttcttccagctgaagccactttttccttatagttaatacaaatgactatttttactttaaaaggcacagctgtcctggtgggaaatgaaacctgcagcagttcaggatgactaatgaaagcaattagcttgaacatttagaaaaaattcatatatgatctaaatttttatattatcatttctgtgccttctaattcctgcatcctgttcaaaacatctttccagacattaacttacacattgtataaaaccgaccaaaatgatttcctaaagttcatgcaaaaaaaaaaaaaaaacaacctaattttctgttaatataaaagaaacttcagtttactgaccgtgaaacagactatgtactgacatccagggtaaagtaaaagacttttaaatattggtcattaaaggacaggagctaagctagcaaagcaaaacatctttagcactttgcagatctcaagcagttaaccaggctctgattcccttccactgttttatgaattaattccagttcttttcatgtatctttgaacctaagattatgaagtaatttccctattagggactagaatgacttcagttttttcatttgataaaaatcagaactgctacctttcccttttttaatgatgcaaaatgtagatgagtgcattaaggtttgtaagatctttatcattttatgtcattcattgaaaattgaaatgttcattctttttaatgttttcctatttccttttgcctagcatttgactttggtgttttaagttctgtagttccatgacatcattgtttgctgttgtgttacagagagagaaggaacctcacctgtggctcagctcaccccacatccgtttctcattacgtgtaaataaactgtcagagctgatgttacagcttttacagtttaaagcattcccctcgtctctagttccttttttcttgtttacatgttttgggcactttccctcattcaccaccttccagggtttcatagaaaataacttgttacaaaatcagttcaattctaatgtggacatagtggcatgttcataattagacccatataggggacactgagctttaaatcgttgattctaaactctatacattaaaaaaattcagcccaggcccctcaaagcctgagaaaatttaatttgctcttaatttaatgttccaaaactcactcttggaaaaatgcctgttggaaaactacaggtgggtcacatgtgggggctgtctccgtgacactcaggattccagtcagaacctaatcctcatatctattgcctacaaaaatagaccaagaatgttgctgctcttttataatcctttaaatatttaacattcaagttttctttgtcttaaattcagcctcttcctaaaagcaaaaaaaaaaaaaaaaa

SEQ ID NO: 428 - DNA, 3579 bp, HOMO SAPIENS
tcaggctcgctgtcgcgccattttgccggggtttgaatgtgaggcggagcggcggcaggagcgggtagtgccagctacggtccgcggctggggttccctcctccgtttctgtatccccacgagatcctatagcaatggaactcagcgatgcaaatctgcaaacactaacagaatatttaaagaaaacacttgatcctgatcctgccatccgacgtccagctgagaaatttcttgaatctgttgaaggaaatcagaattatccactgttgcttttgacattactggagaagtcccaggataatgttatcaaagtatgtgcttcagtaacattcaaaaactatattaaaaggaactggagaattgttgaagatgaaccaaacaaaatttgtgaagccgatcgagtggccattaaagccaacatagtgcacttgatgcttagcagcccagagcaaattcagaagcagttaagtgatgcaattagcattattggcagagaagattttccacagaaatggcctgacttgctgacagaaatggtgaatcgctttcagagtggagatttccatgttattaatggagtcctccgtacagcacattcattatttaaaagataccgtcatgaatttaagtcaaacgagttatggactgaaattaagcttgttctggatgcctttgctttgcctttgactaatctttttaaggccactattgaactctgcagtacccatgcaaatgatgcctctgccctgaggattctgttttcttccctgatcctgatctcaaaattgttctatagtttaaactttcaggatctccctgaattttttgaagataatatggaaacttggatgaataattttcatactctcttaacattggataataagcttttacaaactgatgatgaagaggaagccggcttattggagctcttaaaatcccagatttgtgataatgccgcactctatgcacaaaagtacgatgaagaattccagcgatacctgcctcgttttgttacagccatctggaatttactagttacaacgggtcaagaggttaaatatgatttgttggtaagtaatgcaattcaatttctggcttcagtttgtgagagacctcattataagaatctatttgaggaccagaacacgctgacaagtatctgtgaaaaggttattgtgcctaacatggaatttagagctgctgatgaagaagcatttgaagataattctgaggagtacataaggagagatttggaaggatctgatattgatactagacgcagggctgcttgtgatctggtacgaggattatgcaagttttttgagggacctgtgacaggaatcttctctggttatgttaattccatgctgcaggaatacgcaaaaaatccatctgtcaactggaaacacaaagatgcagccatctacctagtgacatctttggcatcaaaagcccaaacacagaagcatggaattacacaagcaaatgaacttgtaaacctaactgagttctttgtgaatcacatcctccctgatttaaaatcagctaatgtgaatgaatttcctgtccttaaagctgacggtatcaaatatattatgatttttagaaatcaagtgccaaaagaacatcttttagtctcgattcctctcttgattaatcatcttcaagctgaaagtattgttgttcatacttacgcagctcatgctcttgaacggctctttactatgcgagggcctaacaatgccactctctttacagctgcagaaatcgcaccgtttgttgagattctgctaacaaaccttttcaaagctctcacacttcctggctcttcagaaaatgaatatattatgaaagctatcatgagaagtttttctctcctacaagaagccataatcccctacatccctactctcatcactcagcttacacagaagctattagctgttagtaagaacccaagcaaacctcactttaatcactacatgtttgaagcaatatgtttatccataagaataacttgcaaagctaaccctgctgctgttgtaaattttgaggaggctttgtttttggtgtttactgaaatcttacaaaatgatgtgcaagaatttattccatacgtctttcaagtgatgtctttgcttctggaaacacacaaaaatgacatcccgtcttcctatatggccttatttcctcatctccttcagccagtgctttgggaaagaacaggaaatattcctgctctagtgaggcttcttcaagcattcttagaacgcggttcaaacacaatagcaagtgctgcagctgacaaaattcctgggttactaggtgtctttcagaagctgattgcatccaaagcaaatgaccaccaaggtttttatcttctaaacagtataatagagcacatgcctcctgaatcagttgaccaatataggaaacaaatcttcattctgctattccagagacttcagaattccaaaacaaccaagtttatcaagagttttttagtctttattaatttgtattgcataaaatatggggcactagcactacaagaaatatttgatggtatacaaccaaaaatgtttggaatggttttggaaaaaattattattcctgaaattcagaaggtatctggaaatgtagagaaaaagatctgtgcggttggcataaccaaattactaacagaatgtcccccaatgatggacactgagtataccaaactgtggactccattattacagtctttgattggtctttttgagttacccgaagatgataccattcctgatgaggaacattttattgacatagaagatacaccaggatatcagactgccttctcacagttggcatttgctgggaaaaaagagcatgatcctgtaggtcaaatggtgaataaccccaaaattcacctggcacagtcacttcacaagttgtctaccgcctgtccaggaagggttccatcaatggtgagcaccagcctgaatgcagaagcgctccagtatctccaagggtaccttcaggcagccagtgtgacactgctttaaactgcatttttctaatgggctaaacccagatggtttcctaggaaatcacaggcttctgagcacagctgcattaaaacaaaggaagttctccttttgaacttgtcacgaattccatcttgtaaaggatattaaatgttgctttaacctgaaccttgagcaaattagttggtttgtgtgatcatacagttatgtgggtggcttctagtttgcaacttcaagggacaagtattaatagttcagtgtatggcgttggtttgtgttgagcgtttgcacggtttggataatcttaaattttgacggacactgtggagactttctgttactaaatccttttgttttgaagctgttgctatttgtatttctcttgtcctttatattttttgtctgtttatttacgcttttattggaaatgtgaataagtaaagaattacttgtgttacttgccaagcagtgcacatttcatagtttcaaatctgtaatcagcaataaaaatcctaaaatatgtacctaaaaaaaaaaaaaaaaaaaa

SEQ ID NO: 429 - DNA, 1730 bp, HOMO SAPIENS
ccccctcctttttaagcgcctcccgccagcctctgctgtggctcgcttcgccgcgctccctccttccccgccttccatacctccccggctccgctcggttcctggccaccccgcagcccctgcccaggtgccatggccgcattgtaccgccctggcctgcggcttaactggcatgggctgagccccttgggctggccatcatgccgtagcatccagaccctgcgagtgcttagtggagatctgggccagcttcccactggcattcgagattttgtagagcacagtgcccgcctgtgccaaccagagggcatccacatctgtgatggaactgaggctgagaatactgccacactgaccctgctggagcagcagggcctcatccgaaagctccccaagtacaataactgctggctggcccgcacagaccccaaggatgtggcacgagtagagagcaagacggtgattgtaactccttctcagcgggacacggtacaactcccgcctggtggggcccgtgggcagctgggcaactggatgtccccagctgatttccagcgagctgtggatgagaggtttccaggctgcatgcagggccgcaccatgtatgtgcttccattcagcatgggtcctgtgggctccccgctgtcccgcatcggggtgcagctcactgactcagcctatgtggtggcaagcatgcgtattatgacccgactggggacacctgtgcttcaggccctgggagatggtgactttgtcaagtgtctgcactccgtgggccagcccctgacaggacaaggggagccagtgagccagtggccgtgcaacccagagaaaaccctgattggccacgtgcccgaccagcgggagatcatctccttcggcagcggctatggtggcaactccctgctgggcaagaagtgctttgccctacgcatcgcctctcggctggcccgggatgagggctggctggcagagcacatgctgatcctgggcatcaccagccctgcagggaagaagcgctatgtggcagccgccttccctagtgcctgtggcaagaccaacctggctatgatgcggcctgcactgccaggctggaaagtggagtgtgtgggggatgatattgcttggatgaggtttgacagtgaaggtcgactccgggccatcaaccctgagaacggcttctttggggttgcccctggtacctctgccaccaccaatcccaacgccatggctacaatccagagtaacactatttttaccaatgtggctgagaccagtgatggtggcgtgtactgggagggcattgaccagcctcttccacctggtgttactgtgacctcctggctgggcaaaccctggaaacctggtatgtgcggtggggaaggtgtggcacagcctccaggcctcagcaccttaatggtggaaaagctttctccacaacctccaaccatcttctaggactgccaggaggcacagaagtcatgaacgtttgcagtttccagtcccaggcaaaatctcagttcatgtcccaactccaccagtcactggttttgtgatctggctaagttgctcaacttccctaagctttagtttccacatcagttgaatgagggtagttgtgatagtacctatctcatgagattgttggaggattaaatagtgcataaaaagggtttatcacactgacaaatacacagtaaattctcaataataaaaaaaaaaaaaaaaaa

SEQ ID NO: 430 - DNA, 2689 bp, HOMO SAPIENS
tttattctctggaacatgaaacattctgttgtgctcatatcatgcaaattatcactagtaggagagcagagagtggaaatgttccaggtataaagacccacaagataaagaagctcagagtcgttagaaacaggagcagatgtacagggtttgcctgactcacactcaaggttgcataagcaagatttcaaaattaatcctattctggagacctcaacccaatgtacaatgttcctgactggaaaagaagaactatatttttctgattttttttttcaaatctttaccattagttgccctgtatctccgccttcactttctgcaggaaactttatttcctacttctgcatgccaagtttctacctctagatctgtttggttcagttgctgagaagcctgacataccaggactgcctgagacaagccacaagctgaacagagaaagtggattgaacaaggacgcatttccccagtacatccacaacatgctgtccacatctcgttctcggtttatcagaaataccaacgagagcggtgaagaagtcaccaccttttttgattatgattacggtgctccctgtcataaatttgacgtgaagcaaattggggcccaactcctgcctccgctctactcgctggtgttcatctttggttttgtgggcaacatgctggtcgtcctcatcttaataaactgcaaaaagctgaagtgcttgactgacatttacctgctcaacctggccatctctgatctgctttttcttattactctcccattgtgggctcactctgctgcaaatgagtgggtctttgggaatgcaatgtgcaaattattcacagggctgtatcacatcggttattttggcggaatcttcttcatcatcctcctgacaatcgatagatacctggctattgtccatgctgtgtttgctttaaaagccaggacggtcacctttggggtggtgacaagtgtgatcacctggttggtggctgtgtttgcttctgtcccaggaatcatctttactaaatgccagaaagaagattctgtttatgtctgtggcccttattttccacgaggatggaataatttccacacaataatgaggaacattttggggctggtcctgccgctgctcatcatggtcatctgctactcgggaatcctgaaaaccctgcttcggtgtcgaaacgagaagaagaggcatagggcagtgagagtcatcttcaccatcatgattgtttactttctcttctggactccctataatattgtcattctcctgaacaccttccaggaattcttcggcctgagtaactgtgaaagcaccagtcaactggaccaagccacgcaggtgacagagactcttgggatgactcactgctgcatcaatcccatcatctatgccttcgttggggagaagttcagaagcctttttcacatagctcttggctgtaggattgccccactccaaaaaccagtgtgtggaggtccaggagtgagaccaggaaagaatgtgaaagtgactacacaaggactcctcgatggtcgtggaaaaggaaagtcaattggcagagcccctgaagccagtcttcaggacaaagaaggagcctagagacagaaatgacagatctctgctttggaaatcacacgtctggcttcacagatgtgtgattcacagtgtgaatcttggtgtctacgttaccaggcaggaaggctgagaggagagagactccagctgggttggaaaacagtattttccaaactaccttccagttcctcatttttgaatacaggcatagagttcagactttttttaaatagtaaaaataaaattaaagctgaaaactgcaacttgtaaatgtggtaaagagttagtttgagttactatcatgtcaaacgtgaaaatgctgtattagtcacagagataattctagctttgagcttaagaattttgagcaggtggtatgtttgggagactgctgagtcaacccaatagttgttgattggcaggagttggaagtgtgtgatctgtgggcacattagcctatgtgcatgcagcatctaagtaatgatgtcgtttgaatcacagtatacgctccatcgctgtcatctcagctggatctccattctctcaggcttgctgccaaaagccttttgtgttttgttttgtatcattatgaagtcatgcgtttaatcacattcgagtgtttcagtgcttcgcagatgtccttgatgctcatattgttccctattttgccagtgggaactcctaaatcaagttggcttctaatcaaagcttttaaaccctattggtaaagaatggaaggtggagaagctccctgaagtaagcaaagactttcctcttagtcgagccaagttaagaatgttcttatgttgcccagtgtgtttctgatctgatgcaagcaagaaacactgggcttctagaaccaggcaacttgggaactagactcccaagctggactatggctctactttcaggccacatggctaaagaaggtttcagaaagaagtggggacagagcagaactttcaccttcatatatttgtatgatcctaatgaatgcataaaatgttaagttgatggtgatgaaatgtaaatactgtttttaacaactatgatttggaaaataaatcaatgctataactatgttgaaaaaaaaaaaaaaaaaa

SEQ ID NO: 431 - DNA, 25 bp, HOMO SAPIENS
gtgagcggactgatgtctggtccct

SEQ ID NO: 432 - DNA, 2162 bp, HOMO SAPIENS
agatctcattccgcctccctctgtcgtcgccccttcccaattctcgcgagacctcaaggagcacagcttctgcgcaccgcacgatactgggagtccaggcgccaagggagggggaagggaaaaggggaaacggtgcaaacggcgtggccgccatcttgcttgtgcccccgcttcgcgcgcgctccgttctccgtgacgcacacttccccctcccctccgccgcgcctgggcctctgcattgcccgactccgtaggagcgcgggggcggctcctgctcttcctggactcctgagcagagttgtcgagatgtccacagaaggaggatttggtggtactagcagcagtgatgcccagcaaagcctacagtcgttctggcctcgggtcatggaagaaatccggaatttaacagtgaaagacttccgagtgcaggaactcccactggctcgtattaagaagattatgaaactggatgaagatgtgaagatgatcagtgcagaagcgcctgtactctttgccaaggcagcccagatttttatcacagagttgactcttcgagcctggattcacacagaagataacaagcgccggactctacagagaaatgatatcgccatggcaattacaaaatttgatcagtttgattttctcatcgatattgttccaagagatgaactgaaacctccaaagcgtcaggaggaggtgcgccagtctgtaactcctgccgagccagtccagtactatttcacgctggctcagcaacccaccgctgtccaagtccagggccagcagcaaggccagcagaccaccagctccacgaccaccatccagcctgggcagatcatcatcgcacagcctcagcagggccagaccacacctgtgacaatgcaggttggagaaggtcagcaggtgcagattgtccaggctcagccacagggtcaagcccaacaggcccagagtggcactggacagaccatgcaggtgatgcagcagatcatcactaacacaggagagatccagcagatcccggtgcagctgaatgccggccagctgcagtatatccgcttagcccagcctgtatcaggcactcaagttgtgcagggacagatccagacacttgccaccaatgctcaacaggggcaaagaaatgcaagtcaggggaagcctcgaaggtgcctgaaagaaaccttacagattacacagacagaggtccagcaaggacagcagcagttcagccagttcacagatggacagcagctctaccagatccagcaagtcaccatgcctgcgggccaggacctcgcccagcccatgttcatccagtcagccaaccagccctccgacgggcaggccccccaggtgaccggcgactgagggcctgagctggcaaggccaaggacacccaacacaatttttgccatacagccccaggcaatgggcacagccttcctccccagaggacccggccgacctcagcgcctcctgcaggctaggacactggtgcactacaccccatgcctgggggccgagattctccagcagaaagatgcaatattttttgtttcctttttttccatttttttctctaaggaatcaatatttcaatatgttgagtgtgtgtccaatgctatgaaattaaaatattaaataacatatttatggcattttcttgaagagtgtggttgaagaaatatttctccttttgtttttcttttttttttgtttgttactgccacttctttttaggagcaaatctccccaggggtgtacggtatttcttgactctgggaacagctgctacccccaagacttgccacgttgttctgccctcagatggaattaggtgaatgtgtgtagctgctttttcactcgtggtcctctccccatcccttgctctgaccccagagctctgtgtatttgcatccagaggccatggaaacattctttgcatttaagagacagatttattccctgtggagagtgggtggattcattgccacactcttttctcccagggacccaggaaactaggactttgtgtgtttgctgcccacctcccttttattttttaaatgcattaaaaactgtgctagtctcctttgcatggacttcaagctgcatgaaatgcaataaatctcattttagataaaaaaaaaaaaaaaaaa

SEQ ID NO: 433 - DNA, 1428 bp, HOMO SAPIENS
gggcctcgccggcgccgtcaagtagcctgggggacaggccggcgcggctgggagcgggtgggcggccgggaggccggagcagcacggccgcaggacctggagctccggctgcgtcttcccgcagcgctacccgccatgcgcctgccgcgccgggccgcgctggggctcctgccgcttctgctgctgctgccgcccgcgccggaggccgccaagaagccgacgccctgccaccggtgccgggggctggtggacaagtttaaccaggggatggtggacaccgcaaagaagaactttggcggcgggaacacggcttgggaggaaaagacgctgtccaagtacgagtccagcgagattcgcctgctggagatcctggaggggctgtgcgagagcagcgacttcgaatgcaatcagatgctagaggcgcaggaggagcacctggaggcctggtggctgcagctgaagagcgaatatcctgacttattcgagtggttttgtgtgaagacactgaaagtgtgctgctctccaggaacctacggtcccgactgtctcgcatgccagggcggatcccagaggccctgcagcgggaatggccactgcagcggagatgggagcagacagggcgacgggtcctgccggtgccacatggggtaccagggcccgctgtgcactgactgcatggacggctacttcagctcgctccggaacgagacccacagcatctgcacagcctgtgacgagtcctgcaagacgtgctcgggcctgaccaacagagactgcggcgagtgtgaagtgggctgggtgctggacgagggcgcctgtgtggatgtggacgagtgtgcggccgagccgcctccctgcagcgctgcgcagttctgtaagaacgccaacggctcctacacgtgcgaagagtgtgactccagctgtgtgggctgcacaggggaaggcccaggaaactgtaaagagtgtatctctggctacgcgagggagcacggacagtgtgcagatgtggacgagtgctcactagcagaaaaaacctgtgtgaggaaaaacgaaaactgctacaatactccagggagctacgtctgtgtgtgtcctgacggcttcgaagaaacggaagatgcctgtgtgccgccggcagaggctgaagccacagaaggagaaagcccgacacagctgccctcccgcgaagacctgtaatgtgccggacttaccctttaaattattcagaaggatgtcccgtggaaaatgtggccctgaggatgccgtctcctgcagtggacagcggcggggagaggctgcctgctctctaacggttgattctcatttgtcccttaaacagctgcatttcttggttgttcttaaacagacttgtatattttgatacagttctttgtaataaaattgaccattgtaggtaatcaggaggag

SEQ ID NO: 434 - DNA, 1789 bp, HOMO SAPIENS
caggtcctgggagaggacagaaaacaactgggactcctcagcccccggcagctcccagtgcccagccacccacaacacaacccaaagccttctagacaagctcagtggaatctgaagggcccaccccatggaggaatgctgggtgacagagatagccaatggctccaaggatggcttggattccaaccctatgaaggattacatgatcctgagtggtccccagaagacagctgttgctgtgttgtgcactcttctgggcctgctaagtgccctggagaacgtggctgtgctctatctgatcctgtcctcccaccaactccgccggaagccctcatacctgttcattggcagcttggctggggctgacttcctggccagtgtggtctttgcatgcagctttgtgaatttccatgttttccatggtgtggattccaaggctgtcttcctgctgaagattggcagcgtgactatgaccttcacagcctctgtgggtagcctcctgctgaccgccattgaccgatacctctgcctgcgctatccaccttcctacaaagctctgctcacccgtggaagggcactggtgaccctgggcatcatgtgggtcctctcagcactagtctcctacctgcccctcatgggatggacttgctgtcccaggccctgctctgagcttttcccactgatccccaatgactacctgctgagctggctcctgttcatcgccttcctcttttccggaatcatctacacctatgggcatgttctctggaaggcccatcagcatgtggccagcttgtctggccaccaggacaggcaggtgccaggaatggcccgaatgaggctggatgtgaggttggccaagaccctagggctagtgttggctgtgctcctcatctgttggttcccagtgctggccctcatggcccacagcctggccactacgctcagtgaccaggtcaagaaggcctttgctttctgctccatgctgtgcctcatcaactccatggtcaaccctgtcatctatgctctacggagtggagagatccgctcctctgcccatcactgcctggctcactggaagaagtgtgtgaggggccttgggtcagaggcaaaagaagaagccccgagatcctcagtcaccgagacagaggctgatgggaaaatcactccgtggccagattccagagatctagacctctctgattgctgatgaggcctcttcccaatttaaacaactcaagtcagaaatcagttcactccctggaagagagagaggggtcttggcactctcttcttacttaaaccagtcccagacacctagacacggacccctttttgctgatgagtgttgggactgactcctggaagacagcctggccttgcccacctgcacacagtctgttggataggtagggccacgaggagtagccaggtaggcgagacacaaaaggcctgggacagggtcagtacaagtcaggtcaggcttcatgcctgcatcctccagagaccacaggagccaaagcgagcctccaggcccagcaatgagggacttgggagaaatctgagaagaatgggttgttctcttgggaagtcagggtatcagatgggatggacatccaggtcttctctctgcctaattgtcaaggcctccttggctctggagctatgaaaggccccactttcaagtcacccttgccactgaggaccgaggactatgctatgatgaggattaaggtgttgacttgcctctttcagagataaatgacaagccttcaaaaaaaaaaaaaaa

SEQ ID NO: 435 - DNA, 1801 bp, HOMO SAPIENS
ctgggccggggtgcggctgggaggaatcggtcctccactgtcccagccggccccgcgccggcgtgtcgcctcccgtccccctagcagcacgctgcgtggctgctcgctggctatttaggacggaagctcggttggtgtttctccagaagtttcccccttgggcggtggtggaggtggtaaccgtgatagtagcagctccggcggcagcaacagcgactacgagggatggcggcggctgcagcaggaactgcaacatcccagaggtttttccagagcttctcggatgccctaatcgacgaggacccccaggcggcgttagaggagctgactaaggctttggaacagaaaccagatgatgcacagtattattgtcaaagagcttattgtcacattcttcttgggaattactgtgttgctgttgctgatgcaaagaagtctctagaactcaatccaaataattccactgctatgctgagaaaaggaatatgtgaataccatgaaaaaaactatgctgctgccctagaaacttttacagaaggacaaaaattagatatagagacggggtttcatcgtgttggccaggctggtctccaactcttgacctcaagtgatccacctgccttggactcccaaagtgctgggattacaggtgcagatgctaatttcagtgtctggattaaaaggtgtcaagaagctcagaatggctcagaatctgaggtgtggactcatcagtcaaaaatcaagtatgactggtatcaaacagaatctcaagtagtcattacacttatgatcaagaatgttcagaagaatgatgtaaatgtggaattttcagaaaaagagttgtctgctttggttaaacttccttctggagaggattacaatttgaaactggaacttcttcatcctataataccagaacagagcacgtttaaagtactttcaacaaagattgaaattaaactgaaaaagccagaggctgtgagatgggaaaagctagaggggcaaggagatgtgcctacgccaaaacaattcgtagcagatgtaaagaacctatatccatcatcatctccttatacaagaaattgggataaattggttggtgagatcaaagaagaagaaaagaatgaaaagttggagggagatgcagctttaaacagattatttcagcagatctattcagatggttctgatgaagtgaaacgtgccatgaacaaatcctttatggagtcgggtggtacagttttgagtaccaactggtctgatgtaggtaaaaggaaagttgaaatcaatcctcctgatgatatggaatggaaaaagtactaaataaattaatttgctctcatcgtattgtgtatattcacctaatgcccattgtgtattgatattgcattcttgaattttgaacactgaatatctttttgaaagattatacttctttacctctttgtgctttagaaattattttccttcaagtgttcaagtctaatgaagaatgaagataacattttatcacttctgtccttaaaggtttcagacatggtgaaactgaataaagcatgtcatttgctcctagatagattcattctatctagttgtggggatggagaaatctttaatggtatattttcggttattgccttatttttgatacagtattctgtcagtaatttattagacctggcagctttgggtgagcttagatttttcaccttcagtgttacattgtgtttgcttttaaaaactgcttttgaatggagttgtaaatacaatttttctatgaagatgtaaaaaaaaaaaaaaa

SEQ ID NO: 436 - DNA, 1752 bp, HOMO SAPIENS
agcgcggtgagtttgaaactgctcgcacttggcttcaaagctggctcttggaaattgagcggagagcgacgcggttgttgtagctgccgctgcggccgccgcggaataataagccgggatctaccatacccattgactaactatggaagattataccaaaatagagaaaattggagaaggtacctatggagttgtgtataagggtagacacaaaactacaggtcaagtggtagccatgaaaaaaatcagactagaaagtgaagaggaaggggttcctagtactgcaattcgggaaatttctctattaaaggaacttcgtcatccaaatatagtcagtcttcaggatgtgcttatgcaggattccaggttatatctcatctttgagtttctttccatggatctgaagaaatacttggattctatccctcctggtcagtacatggattcttcacttgttaaggtagtaacactctggtacagatctccagaagtattgctggggtcagctcgttactcaactccagttgacatttggagtataggcaccatatttgctgaactagcaactaagaaaccacttttccatggggattcagaaattgatcaactcttcaggattttcagagctttgggcactcccaataatgaagtgtggccagaagtggaatctttacaggactataagaatacatttcccaaatggaaaccaggaagcctagcatcccatgtcaaaaacttggatgaaaatggcttggatttgctctcgaaaatgttaatctatgatccagccaaacgaatttctggcaaaatggcactgaatcatccatattttaatgatttggacaatcagattaagaagatgtagctttctgacaaaaagtttccatatgttatatcaacagatagttgtgtttttattgttaactcttgtctatttttgtcttatatatatttctttgttatcaaacttcagctgtacttcgtcttctaatttcaaaaatataacttaaaaatgtaaatattctatatgaatttaaatataattctgtaaatgtgtgtaggtctcactgtaacaactatttgttactataataaaactataatattgatgtcaggaatcaggaaaaaatttgagttggcttaaatcatctcagtccttatggcagttttattttcctgtagttggaactactaaaatttaggaaaatgctaagttcaagtttcgtaatgctttgaagtatttttatgctctgaatgtttaaatgttctcatcagtttcttgccatgttgttaactatacaacctggctaaagatgaatatttttctactggtattttaatttttgacctaaatgtttaagcattcggaatgagaaaactatacagatttgagaaatgatgctaaatttataggagttttcagtaacttaaaaagctaacatgagagcatgccaaaatttgctaagtcttacaaagatcaagggctgtccgcaacagggaagaacagttttgaaaatttatgaactatcttatttttaggtaggttttgaaagctttttgtctaagtgaattcttatgccttggtcagagtaataactgaaggagttgcttatcttggctttcgagtctgagtttaaaactacacattttgacatagtgtttattagcagccatctaaaaaggctctaatgtatatttaactaaaattactagctttgggaattaaactgtttaacaaataaaaaaaaaaaa

SEQ ID NO: 437 - DNA, 1780 bp, HOMO SAPIENS
gcagagctaccatgtcctcttggagcagacagcgaccaaaaagcccagggggcattcaaccccatgtttctagaactctgttcctgctgctgctgttggcagcctcagcctggggggtcaccctgagccccaaagactgccaggtgttccgctcagaccatggcagctccatctcctgtcaaccacctgccgaaatccccggctacctgccagccgacaccgtgcacctggccgtggaattcttcaacctgacccacctgccagccaacctcctccagggcgcctctaagctccaagaattgcacctctccagcaatgggctggaaagcctctcgcccgaattcctgcggccagtgccgcagctgagggtgctggatctaacccgaaacgccctgaccgggctgcccccgggcctcttccaggcctcagccaccctggacaccctggtattgaaagaaaaccagctggaggtcctggaggtctcgtggctacacggcctgaaagctctggggcatctggacctgtctgggaaccgcctccggaaactgccccccgggctgctggccaacttcaccctcctgcgcacccttgaccttggggagaaccagttggagaccttgccacctgacctcctgaggggtccgctgcaattagaacggctacatctagaaggcaacaaattgcaagtactgggaaaagatctcctcttgccgcagccggacctgcgctacctcttcctgaacggcaacaagctggccagggtggcagccggtgccttccagggcctgcggcagctggacatgctggacctctccaataactcactggccagcgtgcccgaggggctctgggcatccctagggcagccaaactgggacatgcgggatggcttcgacatctccggcaacccctggatctgtgaccagaacctgagcgacctctatcgttggcttcaggcccaaaaagacaagatgttttcccagaatgacacgcgctgtgctgggcctgaagccgtgaagggccagacgctcctggcagtggccaagtcccagtgagaccaggggcttgggttgagggtggggggtctggtagaacactgcaacccgcttaacaaataatcctgcctttggccgggtgcgggggctcacgcctgtaatcccagcactttgggaggcccaggtgggcggatcacgaggtcaggagatcgagaccatcttggctaacatggtgaaaccctgtctctactaaaaatataaaaaattagccaggcgtggtggtgggcacctgtagtcccagcaactcgggaggctgaggcaggagaatggcgtgaacttgggaggcggagcttgcggtgagccaagatcgtgccactgcactctagcctgggcgacagagcaagactgtctcaaaaaaattaaaattaaaattaaaaacaaataatcctgccttttacaggtgaaactcggggctgtccatagcggctgggaccccgtttcatccatccatgcttcctagaacacacgatgggctttccttacccatgcccaaggtgtgccctccgtctggaatgccgttccctgtttcccagatctcttgaactctgggttctcccagccccttgtccttccttccagctgagccctggccacactggggctgcctttctctgactctgtcttccccaagtcagggggctctctgagtgcagggtctgatgctgagtcccacttagcttggggtcagaaccaaggggtttaataaataacccttgaaaactgga

SEQ ID NO: 438 - DNA, 1194 bp, HOMO SAPIENS
tgtcgggtcccaaaatacgtggtctaaagtcctttgggctcctgccgctgccagcactgatcatatgctcttgaccctggtcgggtggggggatgtctggatacctcctctgtggaaagaactggccacacatccgcagaggtgactcgggctgagaacccaggctcctcctccctttggtgacacgcccctcggtccctcactggcacttctccctccggccacacggcggcgtctcgccatagcgcagcggccgatggtacagcccgctcccccctcgcgctctcggacagtgggtccttccacttgtagaaaagcattgtgggacggaagcctgtcctttcttccttttggtgcgagcttgctgtggtttttgctctgggtcctctgggatggcgcctggctgtggccgcgtggtctctcacgcaggggcgccgggcgggggaacgcggccaccctgagtctggtgagtcgactgcggcggcctgtgtccgaagtgtccggggccgtgaacaagggcagcggcctggcctcaggcctgcgttcccacgtttggaaacggggagcttcgtcgatttgtgtttacatcatcgactatgccagggagttctccagataagcctggttttattttcgtcagtgaaaaggccttaccgtataactgactttatgcttgccctgcccccgtataaaataacttaaaagcagcgtgcctggttacagctgtttccacgtgcggtgctcgtcgggagtgatcacctaccctacaggtggaagatggatgcctgaagtgtagactgctgctagctgaataccatctgggagcataaaggtgacctgaaggatgtccttggtgaggattttgaaaatttgatcttcacaagagttgcctggatcatttgaaatttctgggagtctgaggagtactgacataattacctgctggagtctgtaaatacacatttaagacagtgaggatgtgaataaatatattaatgcactttggcatttgtgttttaagtgattaactgccagaaacagctatttctaaaaagttataagggaggaggggttcttttttgatcagtattcactgctgtcaccataattaatagccttaaaatagcttgtgtttggcccaaagagaaatgtactttcttccagtgactcaaaaatcgtggctagaactagact

SEQ ID NO: 439 - DNA, 1526 bp, HOMO SAPIENS
accttgcggccccgccccctcgccctctagccccctcccgcgggagtcgcggcgctgcgggtaggagccgggttgcgggagaccccaggttcggttgggattcccagccagaacggagcttaagccgggcaggcgagcgaatgacggagtagcgagctgcacggcggcgtgctgcgctgttgaggacgctgtcccgcgcgctcccaggccgccccgaggcttggggtcttcgaaggataatcggcgcccggggccgaacagcgggggcacacggggcgctgccgaagtgcaaggccacggccagagctcgagcccgacgcgctgtctggagtcgtaggaccctgacgtggctgaagcggccccgggagcatgagcgggcagcgcgtggacgtcaaggtggtgatgctgggcaaggagtacgtgggcaagactagcctggtggagcgctacgtgcacgaccgctttctggtggggccttatcagaacaccatcggggccgccttcgtggccaaggtgatgtcggtcggagaccggactgtgacattaggtatttgggacacagcaggctctgagcgctatgaggccatgagtagaatctactatcggggtgccaaggctgccatcgtctgctatgacctcacagacagcagcagctttgagcgagcaaagttctgggtgaaggaactgcgcagcctagaggagggctgccaaatctacttatgtggcaccaagagtgacctgctggaagaagaccggaggcgtcgacgtgtggacttccacgacgtccaggactatgcagacaatatcaaagctcagctctttgaaacatccagcaagacaggccagagtgtggacgagctcttccagaaagtggcagaggattacgtcagtgtggctgccttccaggtgatgacagaggacaagggcgtggatctgggccagaagccaaacccctacttctacagctgttgtcatcactgagtcagcactcacctggcctgggggaattaaaggaattccccgtaagggctggacccagctcctttctgggcttgggtagtcaaatgtctgagctaccccaggtcctcatgtcagcagagtggcgcctgcctgtgctggcccatggaacggagacagcattgggctgactgtgggcatgaggagggataaggctgatttggaccccaggcttctgccctggacagcacttgtgtctgcagattatttaagtggcttttgatctgtaaataaaatcagtgcactgtgcatcacacccagcccctttccctgctgtgtggattaggtgtcaagacacctagttcttcctggggccacccggctggcctcactgcttatattaaggctcctcccaactctcattttcctttggaaaacaagacttttttccccatggttaccgctgagatactggggctgtagtagtataaaagctcacagttccttctgagtgctgaaaagagtgcatgagttgcttcgaaataaaagggtcaagcattcctacctga

SEQ ID NO: 440 - DNA, 3108 bp, HOMO SAPIENS
gaaatactcgtctctggtaaagtctgagcaggacagggtggctgactggcagatccagaggttcccttggcagtccacgccaggccttcaccatggatcagttccctgaatcagtgacagaaaactttgagtacgatgatttggctgaggcctgttatattggggacatcgtggtctttgggactgtgttcctgtccatattctactccgtcatctttgccattggcctggtgggaaatttgttggtagtgtttgccctcaccaacagcaagaagcccaagagtgtcaccgacatttacctcctgaacctggccttgtctgatctgctgtttgtagccactttgcccttctggactcactatttgataaatgaaaagggcctccacaatgccatgtgcaaattcactaccgccttcttcttcatcggcttttttggaagcatattcttcatcaccgtcatcagcattgataggtacctggccatcgtcctggccgccaactccatgaacaaccggaccgtgcagcatggcgtcaccatcagcctaggcgtctgggcagcagccattttggtggcagcaccccagttcatgttcacaaagcagaaagaaaatgaatgccttggtgactaccccgaggtcctccaggaaatctggcccgtgctccgcaatgtggaaacaaattttcttggcttcctactccccctgctcattatgagttattgctacttcagaatcatccagacgctgttttcctgcaagaaccacaagaaagccaaagccattaaactgatccttctggtggtcatcgtgtttttcctcttctggacaccctacaacgttatgattttcctggagacgcttaagctctatgacttctttcccagttgtgacatgaggaaggatctgaggctggccctcagtgtgactgagacggttgcatttagccattgttgcctgaatcctctcatctatgcatttgctggggagaagttcagaagatacctttaccacctgtatgggaaatgcctggctgtcctgtgtgggcgctcagtccacgttgatttctcctcatctgaatcacaaaggagcaggcatggaagtgttctgagcagcaattttacttaccacacgagtgatggagatgcattgctccttctctgaagggaatcccaaagccttgtgtctacagagaacctggagttcctgaacctgatgctgactagtgaggaaagatttttgttgttatttcttacaggcacaaaatgatggacccaatgcacacaaaacaaccctagagtgttgttgagaattgtgctcaaaatttgaagaatgaacaaattgaactctttgaatgacaaagagtagacatttctcttactgcaaatgtcatcagaactttttggtttgcagatgacaaaaattcaactcagactagtttagttaaatgagggtggtgaatattgttcatattgtggcacaagcaaaagggtgtctgagccctcaaagtgaggggaaaccagggcctgagccaagctagaattccctctctctgactctcaaatcttttagtcattatagatcccccagactttacatgacacagctttatcaccagagagggactgacacccatgtttctctggccccaagggcaaaattcccagggaagtgctctgataggccaagtttgtatcaggtgcccatccctggaaggtgctgttatccatggggaagggatatataagatggaagcttccagtccaatctcatggagaagcagaaatacatatttccaagaagttggatgggtgggtactattctgattacacaaaacaaatgccacacatcacccttaccatgtgcctgatccagcctctcccctgattacaccagcctcgtcttcattaagccctcttccatcatgtccccaaacctgcaagggctccccactgcctactgcatcgagtcaaaactcaaatgcttggcttctcatacgtccaccatggggtcctaccaatagattccccattgcctcctccttcccaaaggactccacccatcctatcagcctgtctcttccatatgacctcatgcatctccacctgctcccaggccagtaagggaaatagaaaaaccctgcccccaaataagaagggatggattccaaccccaactccagtagcttgggacaaatcaagcttcagtttcctggtctgtagaagagggataaggtacctttcacatagagatcatcctttccagcatgaggaactagccaccaactcttgcaggtctcaacccttttgtctgcctcttagacttctgctttccacacctggcactgctgtgctgtgcccaagttgtggtgctgacaaagcttggaagagcctgcaggtgctgctgcgtggcatagcccagacacagaagaggctggttcttacgatggcacccagtgagcactcccaagtctacagagtgatagccttccgtaacccaactctcctggactgccttgaatatcccctcccagtcaccttgtggcaagcccctgcccatctgggaaaataccccatcattcatgctactgccaacctggggagccagggctatgggagcagcttttttttcccccctagaaacgtttggaacaatctaaaagtttaaagctcgaaaacaattgtaataatgctaaagaaaaagtcatccaatctaaccacatcaatattgtcattcctgtattcacccgtccagaccttgttcacactctcacatgtttagagttgcaatcgtaatgtacagatggttttataatctgatttgttttcctcttaacgttagaccacaaatagtgctcgctttctatgtagtttggtaattatcattttagaagactctaccagactgtgtattcattgaagtcagatgtggtaactgttaaattgctgtgtatctgatagctctttggcagtctatatgtttgtataatgaatgagagaataagtcatgttccttcaagatcatgtaccccaatttacttgccattactcaattgataaacatttaacttgtttccaatgtttagcaaatacatattttatagaacttcca

SEQ ID NO: 441 - DNA, 1665 bp, HOMO SAPIENS
gcactccccagtggatggccgtgtatcaggagccggcccttttctggaaacaggccagcattcagtctccacagaggcaccataaacacgctggtggggccctgtactgtggtcaaagtcaaggcctccgggcaggactcgcggcccctccggctggcgggtggggttgacccgcacgtcccgccccgcctctcccttcgcgctccggacgggcgacggtagctcgagacccgggactccgcccgcctccccgcgagtatttgaggtccggggcggctccggcgcctctgcccgccgttctgctcgctcgctccccgctctggagtacgtgtctggcttgggagccgctcggacacgctggcttgggtctgccatcatggatgttctcgcagaagcaaatggcacctttgccttaaaccttttgaaaacgctgggtaaagacaactcgaagaatgtgtttttctcacccatgagcatgtcctgtgccctggccatggtctacatgggggcaaagggaaacaccgctgcacagatggcccagatactttctttcaataaaagtggcggtggtggagacatccaccagggcttccagtctcttctcaccgaagtgaacaagactggcacgcagtacttgcttaggatggccaacaggctctttggggaaaagtcttgtgatttcctctcatcttttagagattcctgccaaaaattctaccaagcagagatggaggagcttgactttatcagcgccgtagagaagtccagaaaacacataaacacctgggtagctgaaaagacagaaggtaaaattgcggagttgctctctccgggctcagtggatccattgacaaggctggttctggtgaatgctgtctatttcagaggaaactgggatgaacagtttgacaaggagaacaccgaggagagactgtttaaagtcagcaagaatgaggagaaacctgtgcaaatgatgtttaagcaatctacttttaagaagacctatataggagaaatatttacccaaatcttggtgcttccatatgttggcaaggaactgaatatgatcatcatgcttccggacgagaccactgacttgagaacggtggagaaagaactcacttacgagaagttcgtagaatggacgaggctggacatgatggatgaagaggaggtggaagtgtccctcccgcggtttaaactagaggaaagctacgacatggagagtgtcctgcgcaacctgggcatgactgatgccttcgagctgggcaaggcagacttctctggaatgtcccagacagacctgtctctgtccaaggtcgtgcacaagtcttttgtggaggtcaatgaggaaggcacggaggctgcagccgccacagctgccatcatgatgatgcggtgtgccagattcgtcccccgcttctgcgccgaccaccccttccttttcttcatccagcacagcaagaccaacgggattctcttctgcggccgcttttcctctccgtgaggacagggcagtcttggtgtgcagcccctctcctctctgtcccctgacactccacagtgtgcctgcaacccaagtggccttatccgtgcagtggtggcagttcagaaataaagggcccatttgtgggatgccgcattcaaaaaaaaaaaaaaaaaaaa

SEQ ID NO: 442 - DNA, 6633 bp, HOMO SAPIENS
cggcgccgcgcggccgcgctagaatggaggcgcccagcggcagcgagcccggcggcgacggggccggggactgcgcccacccggacccccgggcccctggcgccgcggcgcccagctccggccccggcccgtgcgcggccgcccgggagtccgagcgccagctgcgcctccgcctctgcgtcctcaacgagatcttgggcaccgagagggactacgtgggcaccttgcgcttcttgcagtcggcattcctgcatcgcatccggcagaacgtggccgactcagtggagaagggcctcacggaggagaatgtcaaggtcctgttctcgaacatcgaagacatcctggaagttcataaggatttcttggccgccttggagtattgtttacacccggagccgcagtctcagcatgaacttgggaatgttttcttaaaattcaaggacaagttctgcgtgtacgaggagtattgcagcaaccatgagaaagccctgaggctgctggtggagctgaacaagatccctaccgtgcgcgccttccttttgagctgcatgcttctgggaggccggaagaccacggacatccctttggaaggctacctgttgtctccgatccagaggatctgcaagtacccgctcctccttaaggagctggccaagaggactcccggcaagcacccagaccaccccgcggtccagagtgccctgcaggccatgaagaccgtttgctccaacatcaatgagaccaagcggcagatggagaagctggaagccctggagcagctgcagtcccacatcgaaggctgggagggttccaacctcacagacatctgcactcagctcctcctgcaagggactttgttaaagatctctgcgggcaacatccaggaaagggccttcttcctcttcgacaaccttctcgtctactgcaagcggaaatccagggtcaccgggagcaagaagtccaccaagaggaccaaatccatcaacggctccctctacatcttcaggggtcgaatcaacactgaagtcatggaggtggagaatgtggaagatgggacagcggattaccatagcaacggctataccgtcaccaacggctggaagatccacaacacggccaagaataagtggtttgtctgcatggccaagacggcagaggagaagcagaagtggctggatgccatcatccgcgagcgggagcagcgcgagagcctgaagctgggcatggagcgtgatgcctacgtcatgattgcggagaagggggagaagctgtaccacatgatgatgaacaagaaggtgaacctcatcaaggaccgccggagaaagctgagcactgtccccaagtgctttcttggcaatgagttcgttgcctggctcctagaaattggtgaaatcagcaagacggaagaaggagtcaacttgggccaagccctgttggagaatggcatcatccaccatgtttccgacaagcaccagttcaagaatgagcaggtgatgtatcgcttccgctacgacgatggcacctacaaggcccgaagtgagctggaggacatcatgtccaagggtgtgaggctttactgccgtcttcacagcctctacaccccggtgatcaaagaccgtgattaccacctgaagacctacaagtcagtgcttcccgggagcaagctggtggactggctgctggctcagggagactgccagactcgggaggaggcagtggcgctcggcgtgggtctgtgcaacaatggcttcatgcaccacgtgctggagaagagcgagttcagggatgagtcccagtacttccgctttcatgctgacgaggagatggaggggaccagcagcaagaacaaacagcttcgcaacgacttcaagctggtggagaacattctggccaagcgcctgctgatcctgccccaggaggaggactatggctttgacatcgaggagaagaacaaggctgtggtggtgaagtccgtccagaggggctcgctggctgaggtggctggcctgcaggtggggaggaagatctactccatcaatgaggacctggtgttcctgcggccgttttcagaggtggagtccatcctcaaccagtccttctgctcccgccgccctctgcgcctcctggtggccacgaaggccaaagagatcatcaaaatccccgaccagccggacacactgtgcttccagattcgtggagctgccccaccgtacgtctatgctgtggggagaggctctgaggccatggctgcagggctctgtgctggtcagtgcattctgaaggtcaatggcagcaacgtgatgaacgatggtgcccctgaggtcctggagcacttccaggcattccggagtcggcgcgaagaggccctgggcctgtaccagtggatctaccacacccatgaggatgcccaggaagcacgagccagtcaggaggcctccactgaggaccccagtggcgagcaggcccaggaggaagaccaggctgattcagccttcccactgctgtccctgggtccccggctgagcctgtgtgaggacagccccatggtcaccctgactgtggacaacgtgcacctggaacacggcgtggtgtatgagtatgtgagcacggcaggcgtcaggtgccatgtgctggagaagatcgtggagccccgcggctgcttcggcctcaccgccaagatcctcgaggcctttgctgccaatgacagcgtcttcgtggagaactgcaggcggctcatggccctgagcagcgccatcgtgaccatgccccactttgagttccgcaacatctgtgacaccaagctggagagcattggccagaggattgcctgctaccaggagtttgcagcccaactgaagagcagggtcagcccacccttcaaacaagcccccctggagccccacccgctgtgtggcctggacttctgccccaccaattgccacatcaacctcatggaagtgtcctaccccaagaccaccccctcagtgggcaggtccttcagcatccgctttggacgcaaaccctccctcatcggccttgacccggagcaaggccacctgaaccccatgtcgtacacccagcactgcatcaccaccatggctgctccctcctggaagtgcttgcctgctgcagagggtgatccccaaggccagggtctccatgatggcagcttcgggccagccagtgggacccttggtcaggaagaccggggcctcagcttcctactcaagcaggaggaccgtgagatccaggatgcctacctgcagctcttcaccaagctggatgtggccctgaaggagatgaagcaatatgtcacccagatcaacaggctgctgtccaccatcacagagcccacctcgggtgggtcctgcgacgcatccttggctgaggaggcctcctccctgcccctggtcagtgaagagagcgagatggacaggagtgaccatgggggcatcaagaaggtgtgcttcaaggtggccgaggaggaccaggaggactcaggccacgacaccatgagttatcgcgactcctacagcgagtgtaacagcaatcgagactcggtcctgtcctacaccagcgtgagaagtaacagctcctacttgggcagcgacgagatggggtctggagatgagctgccctgtgacatgcggatcccatctgacaagcaggacaagcttcatggctgcctggagcacctctttaaccaggtggactccatcaatgctctcctcaaggggccagtcatgagccgggctttcgaagagaccaagcatttccctatgaaccacagcttacaagagtttaaacagaaagaagagtgtacaatccgtggccggagcctgatccagattagcatccaggaggacccctggaacctccccaactccatcaagaccctggtggacaacattcagagatatgtggaagatgggaagaaccagctgctcctggccttgctgaagtgcacagacacggagctgcagctgcgcagagacgcgatcttctgccaggccctggtggccgccgtgtgcaccttctccgagcagctgctggcggccctgggctaccgctacaacaacaatggcgagtacgaggagagcagccgcgacgccagccgcaagtggctggagcaggtggcggccacgggcgtcctgctgcactgccagtccctgctctcgccagccacagtgaaggaggaacggaccatgctggaggacatctgggtgacgctgtcagagctggacaatgtcaccttctcctttaagcagctggacgagaactatgtggccaacaccaacgtcttctaccacattgagggcagccggcaggcgctgaaggtcatcttctacctcgacagctaccacttctccaagctgccctcccgcctggagggtggggccagcctgaggctgcacacagcgctgttcacgaaagtgctggagaacgtggaggggctgccttctccaggcagccaggccgcggaggatttgcagcaggacatcaacgcgcagtccctggagaaagttcagcagtattaccgcaaactcagggcattttacctggagcggtctaacctgcccacggatgccagcaccacggcggtaaagatagaccagctgatccgccccatcaatgccctggatgagctctgccgcctcatgaagtcctttgtccacccaaagcctggtgctgctgggagtgtgggcgccggcctcatccccatctcctcggagctctgctaccgcctgggggcctgccagatggtcatgtgtggcacaggcatgcagaggagcaccctgagcgtgtccctggagcaggcggccatcttggcacggagccacgggttgctgcccaagtgcatcatgcaggccacggacatcatgcggaagcagggcccaagggtggagattctggccaaaaacctgcgagtcaaggaccagatgccccagggtgctccgcgcctctaccgcctctgccagccgccggtggatggggacctctgaacacccaaatgccccacgctgggccgcggcctctggagctgggatttgggaggacacagcaggcagcgctggccttctccagggatggcccaaggcttccgcagccgcccgttccgggacctgcccagcgtcctccctgcctccttccgggacaagcctggccaccctcgctgtgatgacgagctggctgattggccctgggccggcccattcttcacacgcctgccagaagctggaggggtgctggagacccatagagctgatgggagcagctggtgcctggccttcggctcctgcgtccccagaacccaagggaacgtcatggaggccacatggggccacccggctccctcgggatggctccgcctgcacttttgaaaccccggtttccttcaacgtccacattccaggtgaccacacgtgtctcctcctcctcatcttagcttccaggttcaccctaaccctgtactaacctgcttggtggacttggaaaagacttggctctgtcgggaaaggagagacggggcctccatcacgcctgttaccagaggatccccgagagccacaccagctctggacatcaccgcccctggaactggggccaccagccctgggcacgagatttgctctgactttatttatatggcatgaaatctctggtttattttgggattttttgttgttggtgttgtcaaagtttgttttttctaaagttgtgtgattatatatttgacattttacatttcaaagaaaggtatgttgtctaacaggggaccaacagaaggtagtattgacaactgttcctgcttctactaaaaaaaaaagagcacaaaagaaaaactaaattattgaaaaattaaaaaatgtcattgtttcctgtttgttaatattagggttgtaaggtgtcgttttgaggtatcgactgtgattccttcccccaccctccattctccagcggttggccggtgttagaactcgctctctttgagtgactggctacaagggcctgagaggtggccagccagggttggagctggaggggatggagccccacctgaggtgccgtgtcacacgggttagagggtcactgggaaacaccgggcggtggcttctgtgatttattttcttgatggtaacttctcagagcagggcgattgggacatcaccagccagagcacaggaagccaccctgcctgctggggaggagggacccacacaagccccctcggcagtttgtccccccagcttcggtatgccttcagggaaaggtcacagctggggaggaagcggggggacgcctgtcacccctggcaggtggtgagttcaggtgggggctccctgctgcccccaggcctgggagcttgaagccctcccggcatctggcatccgagcctcccgccctccagggtgcgcttccctctcttgccgcagcatacacgagggcaggcagtggccttgtcactgtatcttgcatcagagacaaaggaggacccgctttagccctgctgcgggaaatgggggagggcccagggccagcgcattgtgcactggtttactttaaaatgtacagattcttctcgttaaattcttgatagattttttattattattaaaagtcagtttataatac

SEQ ID NO: 443 - DNA, 5318 bp, HOMO SAPIENS
gagaagccatcttgtagttgaaggaaagcagcaggacggaaaccagacttcccccccacggttccctaaaggtcacggataaagaatgaaaaaccgggactagttaagccaaggagagaagagcaagtgttcccggaagggggcgcgatgtgttgaggttaacaaagagaaagacagctgcggggtcagctaaggtctccgctttcgctaccgacccagactgctcaccttcacaaactcacgttttcctcaagcggcaccctcggcagcgctcaagtgagagtattccatccttggaatactccgagaaggttcgagccagaagttggattgcctgaaatgccgcttccagcgcactaagtaacttgaactgcgctaagcaactggccagaattggtttggtttggtttgaccctggggttcctccgtagtctgtaagtggagttgcgaactcaaccccttctccaaggcgggagtgtttctaggagggaacatacttccccttaaaggaagatcacgttgctaaagtaaaaaatttgaaggcgccctatgtgtagaacacttacgttcttggctttctggccactataaagatgggtcgggaatggcgccagctacgttaaaaagtaacgtgcaggaatggttcagttgcccggtgttgaccagagtagagatggttttgcccacaaaaaaaatggcgccgaaacatgtcaatccgcacaatcacgtgttcacaaacctggatgagagatggtatggcttcagatgacaaacggatgttattattctttacttccgggtgagacaaatcgggcgccatcttgtcttgttcccgaagaagtagaagcatcgaaagcgttggagaggtgttaccggaacggcggcgacaagggtgttcccgaactagagtggggcatacataatcttgctgctatgcttcgaagctgtagtctgaatcaacctaagttttaaacagaaggtgaacctctgagatagaaaatcaagtatattttaaaagaagggatgtgggatcaaggaggacagccttggcagcagtggcccttgaaccagcaacaatggatgcagtcattccagcaccaacaggatccaagccagattgattgggctgcattggcccaagcttggattgcccaaagagaagcttcaggacagcaaagcatggtagaacaaccaccaggaatgatgccaaatggacaagatatgtctacaatggaatctggtccaaacaatcatgggaatttccaaggggattcaaacttcaacagaatgtggcaaccagaatggggaatgcatcagcaacccccacacccccctccagatcagccatggatgccaccaacaccaggcccaatggacattgttcctccttctgaagacagcaacagtcaggacagtggggaatttgcccctgacaacaggcatatatttaaccagaacaatcacaactttggtggaccacccgataattttgcagtggggccagtgaaccagtttgactatcagcatggggctgcttttggtccaccgcaaggtggatttcatcctccttattggcaaccaggacctccaggacctccagcacctccccagaatcgaagagaaaggccatcatcattcagggatcgtcagcgttcacctattgcacttcctgtgaagcaggagcctccacaaattgacgcagtaaaacgcaggactcttcccgcttggattcgcgaaggtcttgaaaaaatggaacgtgaaaagcagaagaaattggagaaagaaagaatggaacaacaacgttcacaattgtccaaaaaagaaaaaaaggccacagaagatgctgaaggaggggatggccctcgtttacctcagagaagtaaatttgatagtgatgaggaagaagaagacactgaaaatgttgaggctgcaagtagtgggaaagtcaccagaagtccatccccagttcctcaagaagagcacagtgaccctgagatgactgaagaggagaaagagtatcaaatgatgttgctgacaaaaatgcttctaacagaaattctgctggatgtcacagatgaagaaatttattacgtagccaaagatgcacaccgcaaagcaacgaaagctcctgcaaaacagctggcacagtccagtgcactggcttccctcactggactcggtggactgggtggttatggatcaggagacagtgaagatgagaggagtgacagaggatctgagtcatctgacactgatgatgaagaattacggcatcgaatccggcaaaaacaggaagctttttggagaaaagaaaaagaacagcagctattacatgataaacagatggaagaagaaaagcagcaaacagaaagggttacaaaagagatgaatgaatttatccataaagagcaaaatagtttatcactactagaagcaagagaagcagacggtgatgtggttaatgaaaagaagagaactccaaatgaaaccacatcagttttagaaccaaaaaaagagcataaagaaaaagaaaaacaaggaaggagtaggtcgggaagttctagtagtggtagttccagtagcaatagcagaactagtagtactagtagtactgtctctagctcttcatacagttctagctcaggtagtagtcgtacttcttctcggtcttcttctcctaaaaggaaaaagagacacagtaggagtagatctccaacaatcaaagctagacgtagcaggagtagaagctattctcgcagaattaaaatagagagcaatagggctagggtaaagattagagatagaaggagatctaatagaaatagcattgaaagagaaagacgacgaaatcggagtccttcccgagagagacgtagaagtagaagtcgctcaagggatagacgaaccaatcgtgccagtcgcagtaggagtcgagataggcgtaaaattgatgatcaacgtggaaatcttagtgggaacagtcataagcataaaggtgaggctaaagaacaagagaggaaaaaggagaggagtcgaagtatagataaagataggaaaaagaaagacaaagaaagggaacgtgaacaggataaaagaaaagagaaacaaaaaagggaagaaaaagattttaagttcagtagtcaggatgatagattaaaaaggaaacgagaaagtgaaagaacattttctaggagtggttctatatctgttaaaatcataagacatgattctagacaggatagtaagaaaagtactaccaaagatagtaaaaaacattcaggctctgattctagtggaaggagcagttctgagtctccaggaagtagcaaagaaaagaaggctaagaagcctaaacatagtcgatcgcgatccgtggagaaatctcaaaggtctggtaagaaggcaagccgcaaacacaagtctaagtcccgatcaaggtagtatactttttaaagtattttgtctgatttttaaaaaaaattgactgaatttattcaaagttgaaagtgtcctttctctctctctttaataaactcagtttggtacttgataaataatcatagtcttaaatgttagaaatcctatataatattatttatttaaaattgcagatttttaatttaaaatacatttttatttttaaattttgtcttttcccttttttttcagatcaacaacccctccccgtcgtaaacgctgaggaatgatgtggcaagaatgccatgatgttctttaaaaaaattccatgagttttaagggcttgtctcattatagaggcacattgtggctgtgtaggtgaaaccagaatcttttttttttttaatctgtaaataggtgtactttttccaatgctgctccaagttacttaataggatttctttgtattacgtttttttcaaaaaatatagtgcataataagactataaacatgccattctctttcagctgtaatgttcttaaaattattcttgaatgtactgtgatgtcaataaagctctttagttcatttttgttaaactcttgcaccttaattttatggttttaatctaaggaacgtacttttataaaaaggcagctggaattttgtataacaggttttaaaggtaccttctctcacctcccccaaagaaaatggtttttacttaatagtttgtcaaagtttgtaaattgtacccatggacttttgccagattccaactttaagggtatgaaagagggctagaaatagacctttacttttcatttggaagtatttgacaactttctaaacttttcttcctattttggggattttcaagtaatatattctctgtgtgtataacgtgtggttcactcctgtaaaatgaaattgctggaatcaatcaagccagtgcaccagtagagttatttgtaaggaacgattgtgtttgacagtaatagtcaagtctggaactatattctacagtcacccacttctgttttagaagcattttgaaacactttttggggttatagaaataagactcatgattcaatatatttatttatatttttaaagtataatatgacctcaaatcaatggaggaatgctgtattatgcaggtttgtgtcaatttcctgacattaaaattgtctgattttgtccgtttcttaaaattatgattagtgagtggtctaacagtttaaggcattgataacttacaagtagaatggggctctcaaagcattttaactcagttgctttagggtccatttttttatgtaatcacttactcagtgataaatgaatctctgaaaacaaatgcttttacattttaatttaaaaagaaaacaggtgcaggccacagaaaagttttaaagtatgccttcttaccagcaatagttcattttaaaaatcatgccagatttttgccaagatcagtgtttcctcaacatgaagatagaaatagatttgtatagtgtgctcttgtacctctacatagattattatataattttgagcagttacacatttatctaaaggaaataaatcaactgtgaataaatgcatgtttaccaaaatggctgtttacagtgcatttagttctgatatttataaagatgacatttcacagaataactttaaaatagtttgaaattctatatagtttagacatcgatcacatctggagacaaaataaaatgtgcaatattttttatgtaggcgagctaacacagtgtacctaattgcagaattatctgattaatttgtaatagataagttgtataacattttcatatcttaaaatgttttttagatcaatcttgaagtgaaatattttcaaaataaaattctacag

SEQ ID NO: 444 - DNA, 2431 bp, HOMO SAPIENS
gtgggcaggcgaggagcgggaagaccatctctgcaagtgcagcatagcctcggcctaggacagcgggagtgcgtggccaaagctgtgagcagaggcacaggtggtggcagacagtagaggcgccccatggggaacatactgacctgtcgtgtgcaccctagcgtcagcctcgagtttgaccagcagcaggggtcggtgtgtccctctgaatctgagatctatgaggcaggagctggggacaggatggcaggagcgcccatggctgctgctgtacagcctgctgaggtgactgttgaagttggtgaggacctccacatgcaccacgttcgtgaccgggagatgcctgaagctttggagtttaacccttctgccaatccagaggcaagcacaatattccagaggaactctcaaacagatgttgtagaaataagaagaagcaactgtacaaaccatgtatctactgtgcgtttcagtcaacaatacagcttgtgttcgacaatattccttgatgacagcacagccatccagcattatcttacaatgacaataatatctgtgaccttggagatacctcatcatatcacacaaagagatgcagatagatctttgagcatacctgatgaacagttacactcatttgcggtttccaccgtgcacattatgaagaaaagaaatggaggtgggagtttaaataactattcctcctccattccatcgactcccagcaccagccaggaggaccctcagttcagtgttcctcccactgccaacacacccacccccgtttgcaagcggtccatgcgctggtccaacctgtttacatctgagaaagggagtgacccagacaaagagaggaaagccccggagaatcatgctgacaccatcgggagcggcagagccatccccattaaacagggcatgctcttaaagcgaagtgggaaatggctgaagacatggaaaaagaaatacgtcaccctgtgttccaatggcgtgctcacctattattcaagcttaggtgattatatgaagaatattcataaaaaagagattgaccttcagacatctaccatcaaagtcccaggaaagtggccatccctagccacatcggcctgcacacccatctccacctctaaaagcaatggcctatccaaggacatggacaccgggctgggtgactccatatgcttcagccccagtatctccagcaccaccagccccaagctcaacccgcccccctctcctcatgccaataaaaagaaacacctaaagaagaaaagcaccaacaactttatgattgtgtctgccactggccaaacgtggcactttgaagccacgacgtatgaggagcgggatgcctgggtccaagccatccagagccagatcctggccagcctgcagtcatgcgagagcagtaaaagcaagtcccagctgaccagccagagcaaggccatggccctgcagtcgatccaaaacatgcgtgggaacgcccactgtgtggactgtgagacccagaatcctaagtgggccagtttgaacttgggagtcctcatgtgtattgaatgctcaggaatccaccgcagtcttggcacccgcctttcccgtgtgcgatctctggagctggatgactggccagttgagctcaggaaggttatgtcatctattggcaatgacctagccaacagcatctgggaagggagcagccaggggcagacaaaaccctcagaaaagtccacgagggaagagaaggaacggtggatccgttccaaatatgaggagaagctctttctggccccactaccctgcactgagctgtccctgggccagcagctgctgcgggccaccgctgatgaggacctgcagacagccatcctgctgctggcacatggctcccgtgaggaggtgaacgagacctgtggggagggagacggctgcacggcgctccatctggcctgccgcaaggggaatgtggtcctggcgcagctcctgatctggtacggggtggacgtcatggcccgagatgcccacgggaacacagcgctgacctacgcccggcaggcctccagccaggagtgcatcaacgtgcttctgcagtacggctgccccgacaagtgtgtgtagtatctgttttatttgactgcagtctccttggtgcaaaaacaaaatgggaaaaataaggataactcagaatttcaaaaggaaatcacaaattcagctaataatagcattttcagtacttttcgtaaactaagtaaatacacaaaatgttgatttttctgaccataagacgtattttatgtccttttgccaaggtggatttgttagtctcaggccctcctggccacattgcccaagtcacacaggcttctgtattatgtatttagataaaatgtgtgaaaatatatttgaaataaagttcataaatatgcattga

SEQ ID NO: 445 - DNA, 2091 bp, HOMO SAPIENS
attgtttaatcaaaggaagagtcaaaataagctacacccagattactgagaaaggtgaaatgaaaacaagctcaaaaccaaattccaggaagatgctgtctttgtattgacttaccatttcatgttttcacacatgtcaaagtcttgaagcttcggtcattagtcttccgcttcctaaagcaagaaactaaatgctgacttgtgtcgtttgccccagatgccaccggaaatgtcatcttctccccagacgctggcttgcaagcacagcagcacccagaggctaacctatttcccctatagcccaagctctgagatctcccgtctggtcacaatgatctacaggagaggaagaaagctatctagggacgagatctagaatcaactgagagagatgcttaaaaatcaccagttactttaatgaccatccgcagagccatcctgtgcaaaggaaggagctaggctgtgcgccctgggcgtcatgatccttctgcgggcctccgaagtgcggcagctgcttcacaataagttcgtggtcatcctgggggactctgtgcatagggcagtatacaaggacctggtgcttctgctgcagaaggaccgcctgctcactcccgggcagcttagagcaaggggggagctgaacttcgaacaagatgagctggtggacggaggccagcggggccacatgcacaacggccttaactaccgtgaggtccgcgagttccgctccgaccaccatctggtacgtttttacttcctcacccgcgtgtactccgattacctccagaccatcttgaaagagctgcagtcgggcgagcacgcccccgacctggtcatcatgaattcctgcctctgggacatctccaggtatggtccgaactcctggagaagctacctggagaacctggagaacctgttccagtgcctgggccaggtgctgcccgagtcttgcctcctggtgtggaacacggccatgcctgtgggcgaggaagtcaccgggggttttcttccgcccaagctccggcggcagaaggccaccttcctgaaaaacgaagtggtcaaagccaacttccacagcgccaccgaggcacgtaaacataacttcgatgtactggacttgcatttccacttccgccacgcgagggagaacctgcactgggacggggtgcactggaatggacgtgtgcaccgctgcctctcccagctgctgctggcccacgtggccgacgcctggggtgtggagctgccccaccgccaccccgtgggcgagtggatcaagaagaaaaaacctggcccgagagtcgaagggccgccccaggccaacagaaatcacccggccttacctctgtccccacccttaccttcccccacataccgccccctgcttgggttcccaccccagcgcttgccgctgctcccgctcctgtccccacagcctcctcctcccattctccatcaccagggaatgccccggttcccacagggtcccccagatgcctgtttttcctcagaccatactttccagtcggatcaattctattgccattcagatgtcccctcatcagcccatgcaggtttcttcgtcgaagacaattttatggttggtcctcagctgcctatgcccttcttccccacaccccgttatcagcggcctgccccagtggtacataggggttttggcaggtatcgtccccgtggcccctatacgccctggggacagcggcctcgaccttcaaagagaagggccccagccaatcctgagccaaggcctcaatagacggacctaggccttatttcctctttatgaacatggattggacagatctgacacttcctttccattgcttggcctgaacagactgaccttgttaacttaagcctggagtccatgcctcgtcttccttttgttcattgctgttaccaagaaagccaaggaagagcagcctgactcattcttcttggctgcagcctcttccccacttcctgggagtgacccagcgttattcctgcctcctcactcctattctctttgcctttgtgtaaaaataaaatggaaataaacaagttgcacagaaaaaaaaaaaaaaaaaa

SEQ ID NO: 446 - DNA, 367 bp, HOMO SAPIENS
atgtctggccgcggtaagggcggaaagggtctaggtaagggtggcgccaagcgtcaccgtaaggtattgcgtgacaatatccaaggaatcaccaagcccgctatccgccgcctggctcgccgcggcggcgtcaagcgtatttctggcctcatttatgaggaaactcgcggagtgctgaaagttttcctggaaaatgtaatccgcgatgctgtcacctacacggaacacgccaaacgcaagacagtcacagccatggacgtggtgtacgcgctcaagcgccagggacgcactctttatggcttcggcggctgagcttacctctacagtacactaccgcaaaaccaacggcccttttcagggccaccta

SEQ ID NO: 447 - DNA, 969 bp, HOMO SAPIENS
tcagctgaccctgcgggaccggaaaaagaaattcccgggccctggcttcttggcgcgatgaggttccggttctgtggtgatctggactgtcccgactgggtcctggcagaaatcagcacgctggccaagatgtcctctgtgaagttgcggctgctctgcagccaggtactaaaggagctgctgggacaggggattgattatgagaagatcctgaagctcacggctgacgccaagtttgagtcaggcgatgtgaaggccacagtggcagtgctgagtttcatcctctccagtgcggccaagcacagtgtcgatggcgaatccttgtccagtgaactgcagcagctggggctgcccaaagagcacgcggccagcctgtgccgctgttatgaggagaagcaaagccccttgcagaagcacttgcgggtctgcagcctacgcatgaataggttggcaggtgtgggctggcgggtggactacaccctgagctccagcctgctgcaatccgtggaagagcccatggtgcacctgcggctggaggtggcagctgccccagggaccccagcccagcctgttgccatgtccctctcagcagacaagttccaggtcctcctggcagaactgaagcaggcccagaccctgatgagctccctgggctgaggagaagggtgttccaggcctgtgtggagccgccctgcccgtatggagtcacgccctctgaactgctcttcgggaggcagccctggttctaggatgctgaggccctggcccggactctggcctcccagatccccagctgcctcacttctctcttgagaacttggctcagggctcctgaggacctttcccagcattaccttcccttcccttgaaaggcaattgttggctgttttcataagcaggaaaaataaacagaagtataaaggaaaaaaaaaaaaaaaaaaaaaaaaaaaaaaaaaaaaaaaaaaaaaa

SEQ ID NO: 448 - DNA, 2179 bp, HOMO SAPIENS
tcctgcctcggcaaccccgggccctgagggcaggccccaaccgcggaggagcaggagagggcggaggccggcgggccatgccctggtcgtcccgcggcgccctccttcgggacctggtcctgggcgtgctgggcaccgccgccttcctgctcgacctgggcaccgacctgtgggccgccgtccagtatgcgctcggcggccgctacctgtgggcggcgctggtgctggcgctgctgggcctggcctccgtggcgctgcagctcttcagctggctctggctgcgcgctgaccctgccggcctgcacgggtcgcagcccccgcgccgctgcctggcgctgctgcatctcctgcagctgggttacctgtacaggtgcgtgcaggagctgcggcaggggctgctggtgtggcagcaggaggagccctctgagtttgacttggcctacgccgacttcctcgccctggacatcagcatgctgcggctcttcgagaccttcttggagacggcaccacagctcacgctggtgctggccatcatgctgcagagtggccgggctgagtactaccagtgggttggcatctgcacatccttcctgggcatctcgtgggcactgctcgactaccaccgggccttgcgcacctgcctcccctccaagccgctcctgggcctgggctcctccgtgatctacttcctgtggaacctgctgctgctgtggccccgagtcctggctgtggccctgttctcagccctcttccccagctatgtggccctgcacttcctgggcctgtggctggtactgctgctctgggtctggcttcagggcacagacttcatgccggaccccagctccgagtggctgtaccgggtgacggtggccaccatcctctatttctcctggttcaacgtggctgagggccgcacccgaggccgggccatcatccacttcgccttcctcctgagtgacagcattctcctggtggccacctgggtgactcatagctcctggctgcccagcgggattccactgcagctgtggctgcctgtgggatgcggctgcttctttctgggcctggctctgcggcttgtgtactaccactggctgcaccctagctgctgctggaagcccgaccctgaccaggtagacggggcccggagtctgctttctccagaggggtatcagctgcctcagaacaggcgcatgacccatttagcacagaagtttttccccaaggctaaggatgaggctgcttcgccagtgaagggataggtgaacggcgtcctttgaagcaggatcagacccagccagcagagatggagagtgactctgttggcagaaggcaggcgaggataagctaacgatgctgctgtggcctctatgcactcagcaagagcgggacgcctgtgctgggccgggcaccagggatggtgctgagtcgggcagaggcctcctttcaaggagttcacagtgaacaagatgagaagggctgggccctggagggtcaagagccccaattatgtacaagacactttgggaggaaagaagactaccttttccccctgccattggtatagctggtgccccaaaacttccacctccctccctggccacctctaaaatgactggtataggtgctgccccaccccttagctcccctatcctgggctaggaggccacaggggctgtcctctagaattcttccttccctcccccacaccattcattcaattcatgaaacaaatctttgccaagagcagtttatgtgccaggaacatcattctgtccttgcaacctggaacaagaccagctaccagcctagcttcatccgctacttgcaccaaccagtcccgggttagatcccaaatgctagaagccagggatgcccaactctgggtggccccagtcagaacctctgggatctcagtgaagctggcctggcctctgctcctgctctcaaggggctgcttttcaaccaagagccttgtgagcctggtctgagccttgcacagccactgagtattttttttgccttagccagtgtacctcctacctcagtctatgtgagaggaagagaatgtgtgtgcctgtgggtctctacaagtgacagatgtgttgttttcaacagtattattaggttatgaataaagcctcatgaaatcctcaaaaaaaaaaaaaaaaaaaag

SEQ ID NO: 449 - DNA, 6118 bp, HOMO SAPIENS
gcccctggcctcccgcgagctgcgcaccgccggccgctgccccagctgcccgagcccgcgccctcgtccgcgcgacccggcggggggctccaggccggcagcatgagcggcggcggcgacgtggtgtgcaccggctggctgaggaaatcgcctcccgagaagaagttgaggcgctatgcctggaagaaacgctggtttatcctgcggagtggccggatgagcggtgacccagatgttctggaatactacaagaacgatcactccaagaagcctctgcggatcatcaacctgaacttctgtgagcaggtagatgcaggcctgacctttaacaagaaggagctgcaggatagttttgtgtttgacatcaagaccagtgaacgcaccttttacctggtggctgagacagaagaggacatgaataagtgggtccagagcatctgccagatctgtggcttcaatcaggctgaggagagcacagactccctgagaaatgtttcctcagccggtcatggcccccgctcttctccagctgagctcagcagctctagccagcaccttctccgagagcgcaagtcctcagccccatcacactccagccagccaactctgttcacgtttgaaccccctgtgtcaaaccacatgcagcccaccttgtccaccagcgcacctcaggagtatctctacttgcaccagtgcataagccgaagagcagaaaatgcaaggagtgccagcttctctcagggcaccagagcctcttttctcatgaggagtgacacagctgtacaaaaacttgcccagggcaatggacactgtgtcaacgggatcagtggtcaagtccatggcttctatagccttcccaagccgagccggcacaatacagaattcagagacagtacctacgacctcccccgcagcctggcctcccatggccacaccaagggcagcctcacaggctccgagacagataatgaggatgtgtacaccttcaagacgcccagcaacaccctgtgcagggagttcggggacctcctggtagacaatatggatgttccggccaccccactctcagcctaccagatccctaggacattcactctggacaaaaaccacaatgccatgacagtggccactcctggggactcagccatagctcccccaccccgcccccccaagccaagtcaggcagaaacacctcgatggggcagtcctcagcagagaccgccaatcagtgaaaatagcagatctgtcgctgccaccatccccagacgcaacaccctccctgcaatggacaacagccgacttcaccgagcttcttcctgtgagacctacgagtacccacagcgtggtggagagagtgcaggccggtctgctgaatccatgagtgatggagttggctctttcctgccagggaaaatgattgtgggccgatcggacagcaccaattctgaagacaactatgtgcccatgaatccaggttcttccaccctgttggccatggaacgagcaggtgataattcccagagcgtctacatcccaatgagcccaggggcccatcactttgactcacttggctacccatcaacaacccttcctgtgcaccgaggccccagcagaggaagtgagattcagccaccccctgtcaaccgcaacctcaaacctgatcggaaagcaaagccaacaccacttgacctgaggaacaacaccgtcatcgatgaactccccttcaagtcacctatcaccaagtcttggtctagggccaaccacaccttcaactccagctcctcccagtactgccgccccatctccacccagagcatcaccagcacagactcaggagacagcgaagagaactatgtccctatgcaaaacccagtgtctgcatctcccgttcccagtggcacgaacagtcctgcccctaagaagagcaccggcagcgttgattatctggccctggacttccagccgagctccccaagcccccaccgcaagccatctacttcatccgtcacctctgatgagaaggtggactacgttcaggtggacaaggagaagacccaggccctgcagaacaccatgcaggagtggacagacgtgcggcagtcctcagagccttccaagggtgccaagctgtgatgagagggccaccgcagagcccaggaggcagcatctccagagctggcccttcccatctcccctctcccctctcccgttcttcctcccatccacctcctctctactctgccagtctcagccttcaaagcacttgacatcagggaccctgaacccttcccctgggaggtgagggcctgatcaaggcacctcctctgcccactcggggcccagctgtgatttttatcagtaatggccatgcctccacccaccttagttaggagctacttccaaaaagcatccttcagcctcttcctgtcctttagacctgactctctaccagatgtttggagggaagggctggggctctgagccagattccacacctcacgttcagtcacagccctcagctatcttccctccggccactgggctacctctccttcagtcccagaagacaagtctcaccaacccagggagtcaaggaccagcaaaccaaagtggataatggactttttcattcctgtttttcttggcaggagagaagcaaggccactaaaagaggagatggtggagacggaggctcagcagtggtcttgaggggtaaaggacttagatgcccagatgaagagggaaagctgacatctgcagggaacccactttgaggctgaggccatggcaggacagctgctgtggggtgcagaggcagaagatgaaggacaaaaggaagggaaaactgatggccaacctagagcagcaaggagcagggcttggagctcgggtggtggagatgacaaggacactgtggggtctgggtccccagaactctggagctacaggccactctaggcccaagggctagtcctcttccccagtcccctcagaggcccccgccagccccaccttgaaagcagcatacaggggaaggcttggaccaagctgggcgaccaagcacatggggcaggaacacatggtaaaggggtggggaatatgggagggagtgtggtgtggatgggggtgatgcagggactgaggggaaccctgggacaggcacaggctgggcagaggcacagggcagtgcaggggactctgcagtggggtcgggaagtgagtttctttgcagtgagcagtgcagtggaagtcgggcacagaggtagcagacagatgtgaagcagtggtgaaggccatgtagcaagtggggaaatacatccaaagggcctgggagttggggggtgcccaacgcaatccttgggggtgcagggtggagcagaaagtgaaggagggacacgtgcaagagtggtgtgcatggtggtgtgacatgaggaccgttcctaggatgggacagtgggtcaggcaggacaaggagaaagcagggcagaatgatgcctagaggaccacatcaggcatggctgacagcttgtgcccatgggctgtggcgtatgtcagatcgcagggtaggaacgagtctggcctggtgccggcccagtgtttcctcagctcatccgccctctgttgctccctagcattccaggagccatcttggactctcctccccaggtttgaaaggccatcagattagcagggacggggtgtagggcatcacccaaggttccttctcttaaactaagggtgggggatctgaatgtttttatgttgactgttcttgactaaattttcaagagtttcagaagcaacaggacagaccagacgtttcattctaccctggggcgaacagaacttcttcctcccaaacaatgacttcctgccatgtttgatggggacagctaccactgtcctctgcccccattcccctttcagctcccatgagcatgcatagttcaccagaccaatggcctagccattctctaagtcccatcctggaagaagttatttcttcaagagctgcacctctcctcctagcattagtttagatcaactcaaggagtatttattaatggctgctgtctccagtttctggggttaagcactaaggacacaagaatcaatcagaccttctccctgaacttaagatagccacaatcagaaaaaggacaaggacatgagacagtggtgatggccatcagacagagacttcaaatgctgatggagggcagaggaagtacttagggaggttggtgtcagaggcaggagtgggggatcagggaaggtggattctaggaaaagggagtgcctgaggtaggccttagaaggggatgagtcagatttttacagaggaggagggcagggcttgggtccagtggaggaagaaggaaggagaggcttggaaagccttgtgtcttgggaacaaaaggcctttgagcatatgggtccagccactcagaagtgcaggggccatgccttggtgttccaataagtgaatggaagcagtggtggtagctacactgggcagagttggcagggtgctggttcactctgcccagccctgaatgtgtgccttaaaggccccctacaaggggccccatacgacagagcttttaactggtgccttccctgtacccgcagcagccacaagtgggcccagactattgcagcctcccataaacatgtgagcatgttctgagtgtgccatgatgtgagtggacctggctggaatcttcggagagcgactgaggtgttcaaatcgaatctcccaggaggcttccttccagccccctattctggtaactaccaggaggcttccttccagccccctattctggtaactaccaaaatccctcgggtgcaagtgtaggggtagagatggaaggatgagaggtgaaattgaccttttgaaagcaaagctctggctcacaggccccaaactaccagccgtatctagcatatccccaccctccacccactacctcctccaacaaaggagtcaactcagttgaaaaaactggtcctttggcctatccatgggtcaaagtccacctctcctgggggcctggagaggactgagcctacggaaaggggataccttcccactcagcactgcttcacacaggccccctgcctggggctctccaaggagccttcttcacccacttccagctccacttctgcaaggttaagtcaagtgagaacgatgagaaatagggagatggtgtctccttaagtccttgatctgcctgtctgtggaatgggaggttggattagctgcgctgaggtcccatccacagctggtgctcagctgcttgaaggggagactccctcctctgtaacttctttctgggggattggggtgggcagtacctatccccagtcccctcctagcttgactttagtggtttccaatgtagaagttaacaaagtatgccccattcctgtgacaaaagcacaaccattctgaagttactggagcatgggctcagctcatcctccctctggccccttctcccatggggacatctcggcccagcacccctatcccatttccagagttcttccttccccatctgggccttcataaaatgcaggggaagccagactggtctcaggagcgctaaagcccttccgtggggggtcgtctttctgggactagccctgctgtttaggacctgggaccacaatggggtacctgccgagggggtccccaagagatccaggctgtcatgtgatttatggtggcatgtgttgtgtatttgttggctacttgtgtcttgaaatctagaattatttcacgcagaattgtcactgtttgtcaggaagagaaaatgggctagtggaagcccagtcttgagttcttgtcttgttaccatttaaaattgacatttaattttcaaatcactgttggtgcctaatcacttaagttattaatttattctgttgtattcttttttttaaattgtaacatatttatccggtgggtgggacaggagtgtgttcaagtgggtcatgtttttgctgtggtgacacatggtacaggcttggagcttgcaggtccctttctactgtggtgttggagcaggacaataaagtccactagaaatgcaccccagaaccaaaa

SEQ ID NO: 450 - DNA, 1402 bp, HOMO SAPIENS
aagatggctgtggagctgggcgtgctgctcgtccggccccggcccggaaccgggctgggtagagtgatgcggaccctcctgctggtgctgtggctggcgacgcgcggaagcgcgctctactttcacatcggagagacggagaagaagtgctttattgaggagatcccggacgagaccatggtcataggaaactaccggacgcagctgtatgacaagcagcgggaggagtaccagccggccaccccggggcttggcatgtttgtggaggtgaaggacccagaggacaaggtcatcctggcccggcagtatggctccgagggcaggttcactttcacttcccatacccctggtgagcaccagatctgtcttcactccaattccaccaagttctccctctttgctggaggcatgctgagagttcacctggacatccaggtaggtgaacatgccaatgactatgcagaaattgctgctaaagacaagttgagtgagttgcagctacgagtgcgacagctggtggaacaagtggagcagatccagaaagagcagaactaccagcggtggcgagaggagcgcttccggcagaccagtgagagcaccaaccagcgggtgctgtggtggtccattctgcagaccctcatcctcgtggccatcggtgtctggcagatgcggcacctcaagagcttctttgaagccaagaagcttgtgtagctgtcccaggcgtcacaacccatcctcccaggctgggggagaaaggacctcctggaactgacttcttctgtcaggaggactggtttccagccatacctgttctggaagggagaggggctggaggcacccacaggcacaagctgaaggcagcagcttggctaatactgagcaggtagtggggcaaattcctgccctctctctctggcctctgggccgtttggtagtaatcacccaagggctggtaaagcccctcctcttggcacctcagaatcacagtgttactgatcagggatgtgaggctgctgttgggggtggggggaggggaatgggcaggcaagccagtcttctgtcttcctttgctaacttagggttttgagcaggttggggtatggtgcctgtcatacccacctgccaccctgggaacctcactgttctctctttcagcctagacctgctgatccagggtgtgtgtgagttgagggtgggtggaggggtttgcagtgtgggaatgtggccctgcagttgacctgagctgcttcacatggttgtccattctggggcttaaagaactgggaccagaccaagtagaggccttggtgctggttggggtggggcctgcagagtcttagttactgatttcattttcaataaatgtaggtttgttacatgagtttcccaataaaaaaaaaaa

SEQ ID NO: 451 - DNA, 3581 bp, HOMO SAPIENS
ggttccgctgaggcgtggtaggaagtggctgccgtcaatcactcggggagactccaaacagtgagcctagagctggagactagcgttaaccggcggggcggccggttttatgaatgaagctatggctacagattccccaagaagacccagtcgttgtactggtggagttgtggttcgcccccaggctgtcacagagcagtcctacatggaaagtgttgtgacttttctgcaggatgttgtgccacaggcttacagtggaacacctctaacagaagaaaaggagaaaatagtctgggtcagatttgaaaatgcagatttaaatgatacatcaagaaatctggaatttcatgaaatacatagtactgggaatgaaccgcctttgttgattatgattggctacagtgatggaatgcaggtctggagcatccctatcagtggcgaagcacaagagctcttctctgttcgacatggcccaattcgagcggctagaatcttgcctgctccacagtttggtgctcaaaaatgtgataactttgctgaaaaaagacccctccttggtgtttgtaagagcattggatcttctggcacaagcccaccgtactgttgtgtggatctgtattcacttcgtactggggagatggtcaagtccattcaatttaagacacctatttatgatctccattgcaataaacggatccttgtcgtagtcttgcaggagaaaattgctgcctttgatagctgtactttcacgaagaaattctttgttacaagctgctatccatgtccagggccaaacatgaatcctattgctcttgggagccgctggcttgcttatgcagaaaacaagttgattcgatgtcatcagtcccgtggtggagcctgtggagacaacattcagtcttatactgccacagtcattagtgctgctaaaacattgaaaagtggcctgacaatggtagggaaagtggtgactcagctgacaggcacactgccttcaggtgtgacagaagatgatgttgccatccacagtaattcacggcggagtcctttggtcccaggcatcatcacagttattgacaccgaaaccgttggagagggccaggtgcttgtgagtgaggattctgacagtgatggcattgtggcccacttccctgcccatgagaagccagtgtgctgcatggcttttaatacaagtggaatgcttctagtcacaacagacacccttggccatgactttcatgtcttccaaattctgactcatccttggtcctcatcacaatgtgctgtccaccatctgtatactcttcacaggggagaaactgaagccaaagtacaggacatctgcttcagccatgactgtcgctgggttgtggtcagtactctccggggtacttcccacgttttccccatcaacccttatggtggccagccttgtgttcgtacacatatgtcaccacgagtagtgaatcgcatgagccgtttccagaaaagtgctggactggaagagattgaacaagaactgacgtctaagcaaggaggtcgctgtagccctgttccaggtctatcaagcagcccttctgggtcacccttgcatgggaaactgaacagccaagactcctataacaattttaccaacaacaaccctggcaaccctcggctctctcctcttcccagcttgatggtagtgatgcctcttgcacaaatcaagcagccaatgacattggggaccatcaccaaacgaaccggcaaagttaaacctcctccacaaatttcacccagcaaatcgatgggcggagaattttgtgtggctgctatcttcggaacatccaggtcatggtttgcaaataatgcaggtctgaaaagagaaaaagatcagtccaaacaagttgtagttgagtccctgtacattatcagttgctatggcaccttagtggaacacatgatggagccgcgacccctcagcactgcacccaagattagtgacgacacaccactggaaatgatgacatcgcctcgagccagctggactctggttagaacccctcaatggaatgaattgcagccaccgtttaatgcaaaccaccctctgctcctcgctgcagatgcagtacagtattatcagttcctgcttgctggcctggttccccctggaagtcctgggcccattactcgacatgggtcttacgacagtttagcttctgaccatagtggacaggaagatgaagaatggctttcccaggttgaaattgtaacacacactggaccccatagacgtctgtggatgggtccacagttccagttcaaaaccatccatccctcaggccaaaccacagttatctcatccagttcatctgtgttgcagtctcatggtccgagtgacacgccacagcctcttttggattttgatacagatgatcttgatctcaacagtctcaggatccagccagtccgctctgaccccgtcagcatgccagggtcatcccgtccagtctctgatcgaaggggagtttccacagtgattgatgctgcctcaggtacctttgacaggagcgtgaccctgctggaggtgtgcgggagctggcctgagggcttcgggctgcggcacatgtcctccatggagcacacggaggagggcctccgggagcgacttgccgacgccatggccgagtcacctagccgggacgtcgtgggatccggaacagaacttcagcgagagggaagcatcgagactctgagtaacagctcaggctccaccagcggcagcataccaagaaactttgatggctaccgatctccgctgcccaccaatgagagccagcccctcagcctcttcccgactggcttcccgtaggtaccagcaacctgcttctgactggccagccccctcccctgctggaggaggggagaagccccgctctggtcctacccttcagtctctgctcttccttcatcaaccaccttccccaagcttagtgacagcagccgcccatcctacctggatggagaagagacccttctccaagcacctcagcgcacttgccctctgccacacctgtcggtggaggctgtggccaggagagactgtagaagctcggtccctgtgtatgtttgcatatgacatcctgcattggatccgcttttgtattttttaaccatacccacggtggggcgggtggggggagcctggaacagtgaccagatctgggggcctgagtggggacagagttgatcgtccacctggccattttgaccctgagtggacagtcacagcctcagctcatgtctggctgtgacacacactgcccccagcttcccttggtcagccccactccagcacggggtgaacggaggcccagagtactagggaaggaggaagggaggacatgcctcttcttcctcctttctttccccatctgttcatgggaagagtttgtctttcttatctttaagcccctttaccctggtcctgtactgatcagtgaaggaaaccgtggttactgaggccctgttgaaaagtgcacgtcttgtccaataaatcacgctgcagttggtgtccatccctgaaaaaaaaaaaaaaaaaa

SEQ ID NO: 452 - DNA, 3951 bp, HOMO SAPIENS
agtttgaccccggcggcgttccgtaccgtcgcggatttcggcggcggaaacatggcggtcgcggccgggccggtaacggagaaagtttacgccgacactggcctgtattagcgcgtatggcctcgggccctcgttccccaaggcgtgccgcctccctgttctcagtcgcaggctgaagccttgtctgctctcctcctttttggtttggttttggaactgactccgagggttgggagagcgcgttggtggcgacggccgagtcagatcactataaacaaaatttccacaagagaaaatgttgaaataggagttgcggatacattggatatactggatgaaatacaagcggttaatttttgtaacgtgagggaaaagcccacattgctggttacatgtgtaaatcactgcgttattgctttagtcattgtctctatttagcaatgacaagactggaagaagtaaatagagaagtgaacatgcattcttcagtgcggtatcttggctatttagccagaatcaatttattggttgctatatgcttaggtctatacgtaagatgggaaaaaacagcaaattccttaattttggtaatttttattcttggtctttttgttcttggaatcgccagcatactctattactatttttcaatggaagcagcaagtttaagtctctccaatctttggtttggattcttgcttggcctcctatgttttcttgataattcatcctttaaaaatgatgtaaaagaagaatcaaccaaatatttgcttctaacatccatagtgttaaggatattgtgctctctggtggagagaatttctggttatgtccgtcatcggcccactttactaaccacagttgaatttctggagcttgttggatttgccattgccagcacaactatgttggtggagaagtctctgagtgtcattttgcttgttgtagctctggctatgctgattattgatctgagaatgaaatctttcttagctattccaaacttagttatttttgcagttttgttatttttttcctcattggaaactcccaaaaatccgattgcttttgcgtgtttttttatttgcctgataactgatcctttccttgacatttattttagtggactttcagtaactgaaagatggaaaccctttttgtaccgtggaagaatttgcagaagactttcagtcgtttttgctggaatgattgagcttacattttttattctttccgcattcaaacttagagacactcacctctggtattttgtaatacctggcttttccatttttggaattttctggatgatttgtcatattatttttcttttaactctttggggattccataccaaattaaatgactgccataaagtatattttactcacaggacagattacaatagccttgatagaatcatggcatccaaagggatgcgccatttttgcttgatttcagagcagttggtgttctttagtcttcttgcaacagcgattttgggagcagtttcctggcagccaacaaatggaattttcttgagcatgtttctaatcgttttgccattggaatccatggctcatgggctcttccatgaattgggtaactgtttaggaggaacatctgttggatatgctattgtgattcccaccaacttctgcagtcctgatggtcagccaacactgcttcccccagaacatgtacaggagttaaatttgaggtctactggcatgctcaatgctatccaaagattttttgcatatcatatgattgagacctatggatgtgactattccacaagtggactgtcatttgatactctgcattccaaactaaaagctttcctcgaacttcggacagtggatggacccagacatgatacgtatattttgtattacagtgggcacacccatggtacaggagagtgggctctagcaggtggagatacactacgccttgacacacttatagaatggtggagagaaaagaatggttccttttgttcccggcttattatcgtattagacagcgaaaattcaaccccttgggtgaaagaagtgaggaaaattaatgaccagtatattgcagtgcaaggagcagagttgataaaaacagtagatattgaagaagctgacccgccacagctaggtgactttacaaaagactgggtagaatataactgcaactccagtaataacatctgctggactgaaaagggacgcacagtgaaagcagtatatggtgtgtcaaaacggtggagtgactacactctgcatttgccaacgggaagcgatgtggccaagcactggatgttacactttcctcgtattacatatcccctagtgcatttggcaaattggttatgcggtctgaaccttttttggatctgcaaaacttgttttaggtgcttgaaaagattaaaaatgagttggtttcttcctactgtgctggacacaggacaaggcttcaaacttgtcaaatcttaatttggaccccaaagcgggatattaataagcactcatactaccaattatcactaacttgccattttttgtatgctgtatttttatttgtggaaaataccttgctacttctgtagctgctctcactttgtcttttcttaagtaattatggtatatataaggcgttgggaaaaaacattttataatgaaagtatgtagggagtcaaatgcttactgtaaatgcataagagacgttaaaaataacactgcactttcaggaatgtttgcttatggtcctgattagaaagaaacagttgtctatgctctgcaatggtcaatgatgaattactaatgccttattttctaggcatataataatagtttagagaatgtagaccagataaatttgtttactgttttaagaaaactaccagtttacttacagaagattcttttttccaaacagtaggtttcatccaagaccatttgaagaactgcaaactctttctcttagaaaagaaagagggcagcctaaaataaacgcaaaatttgcttatactccatcacattcagatgtcttggttgtgacttattaccagtgtggcagagaacccaagttacattttagatcaaaatattctttatgtaggtattgttaaaaggctagagcctacaagttgctcttccatgcgttggtcagggggccctgaaaacactggtaatattaagagtctttctcagggtaacttaatgttttcttaatgaacagtgtttccagctacaaattcttccaataaattgtcttcctttttgaaaagtactctcatagaagaaatttagcaatttctcgttgactgactcagtctattttaagtattcagaaaagattttgatccccattgagttaatgctctgccttgaaaattatttttctgatccttgttagtgataacattttttttctactgaaggtcagaggataggaaacaagtatttctcttctggtatacatgtaatgtattctgtaaaaaagtattcatattggcaattttagttaggcataatattgtggttgtaatttttaaaacttagtgttttgtctgattaaagcaggcactgatcagggtatctcctaagaggtaattcacttcttattcctttccaataattattacattctaaattttcatctatgagaaataacaaacaagaagggaatagaattaaattggggtataatctaatcttcattgtttaaatggtttgccttctcaccattgaagccatttttttatagcctcagaaagaggaaataatgcctccaccattttctacctggtgacttgaaaattgaacttttaagttaggaagaagttagagtcagggaacttgtataccactatctatgcagcattgttatagtctgattatttctgtgttttgaatatgattttcctaatgctctaaataaaattttgttaaaaattaa

SEQ ID NO: 453 - DNA, 2206 bp, HOMO SAPIENS
cggcgagtctccatggcggtggcggcggcagctgcggcgggacccgtgttctggaggcgactgctgggcctcctgcctggccgcccagggctggccgcgctcctgggacgcctgtccgaccgcctcggcaggaaccgggaccgccagcgcaggaggtcaccatggctgttattggctcccttgctgtccccagctgttccccaggtcacctccccaccttgctgcctgtgtccagaaggcgtgcaccggttccagtggatcagaaacctggttccagaatttggagtctccagttctcacgttagggtgctttcttccccggcagagtttttcgagctcatgaaggggcagataagagtagccaagaggcgggtcgtgatggcatccctctacctggggacaggtcctttggaacaggagctggtggactgcctggaaagtactctagaaaagtcactccaagcaaagtttccttcaaatctcaaggtctccattctcttagacttcacgcggggctcacgaggccggaagaactcccgcacaatgctgctcccactcctgcggaggttcccagagcaggtccgagtctccctctttcacacgccgcacctccgtgggctgcttcggctcctcatccctgagcgcttcaacgagaccatcggcctccagcacattaaggtgtacctcttcgacaacagcgtcatcttgagcggtgcaaacctgagtgactcctacttcaccaaccgccaggaccgctacgtgttcctgcaggactgtgcggagattgccgacttcttcacggagctggtggacgcggtgggggatgtgtccctgcagctgcagggggacgacacggtgcaggtggtggatgggatggtgcatccttacaaaggggaccgggccgagtactgcaaggcagccaataagagggtcatggatgtgatcaactcagccaggacccgccagcagatgctgcatgcccagaccttccacagcaactctcttttgacccaggaagatgcagcagctgctggggatcgcagaccagcccctgacacctggatttatccgctgattcagatgaagcccttcgagattcaaatcgatgagattgtcactgagaccctgttgactgaggcggagcgcggggcaaaggtctacctcaccactggctatttcaacctgacccaggcctacatggacctggtcttgggcactcgggctgagtaccagatcctgctggcctcaccagaggtgaatggcttctttggggccaagggggtggccggcgccatcccagcggcctatgtgcacatcgagcgacagttcttcagtgaggtgtgcagcctgggacagcaggagcgggtccagcttcaggagtactggcggaggggctggacgttccacgccaaaggcctctggctgtacctggcagggagcagcctgccctgtctcacgctgattggctctcctaattttgggtacaggtcagttcaccgggacctggaggcccagattgcgatcgtgacggagaaccaggccctgcagcagcagcttcaccaggagcaagagcagctctacctgaggtcaggtgtggtgtcctctgccaccttcgagcagccgagtcgccaggtgaagctgtgggtgaagatggtgactccactgatcaagaacttcttctgaggacagacaggaatggccttgatgaagatgacaggcatggccggggtcagctctttcagccgcgcttcagcgatgactccagtctgggtgtcccagcgagcccctgcagggacagtatggctgagggtcaggtgtgctgccagtaagtgagggaggggctggcaggaagggtggggtcctcacactccccgccctctgcagagctgggctctaccccaaaaggcttcaggccagctgccacagctggaagcagaggccttcgtaggtgatggcctgcatgttgtaactaccccgtcccgctgggctcaaggaacagctcagctaaagccctcgggttccatccgtttaaatctgtggcattttcagagcctcatctgtcagccttaatgtcagtggcaggaagtcataactccagctaaaaattacagagtaaagttccctgattcttaatgtgtaatgtctgccctatgtgtacatacacaatataattatacatctgtgcatataaaaaaaaaaaaaaaaa

SEQ ID NO: 454 - DNA, 3229 bp, HOMO SAPIENS
tcgccctgttcgcgcgtccgctgtccggcctccggtcacgtgacagcagcgcaggtgagcgccgcttccggggtcgggcgcctggatagctgccggctccggcttccacttggtcggttgcgcgggagactatggcgtcctcctcggtcccaccagccacggtatcggcggcgacagcaggccccggcccaggtttcggcttcgcctccaagaccaagaagaagcatttcgtgcagcagaaggtgaaggtgttccgggcggccgacccgctggtgggtgtgttcctgtggggcgtagcccactcgatcaatgagctcagccaggtgcctcccccggtgatgctgctgccagatgactttaaggccagctccaagatcaaggtcaacaatcaccttttccacagggaaaatctgcccagtcatttcaagttcaaggagtattgtccccaggtcttcaggaacctccgtgatcgatttggcattgatgaccaagattacttggtgtcccttacccgaaacccccccagcgaaagtgaaggcagtgatggtcgcttccttatctcctacgatcggactctggtcatcaaagaagtatccagtgaggacattgctgacatgcatagcaacctctccaactatcaccagtacattgtgaagtgccatggcaacacgcttctgccccagttcctggggatgtaccgagtcagtgtggacaacgaagacagctacatgcttgtgatgcgcaatatgtttagccaccgtcttcctgtgcacaggaagtatgacctcaagggttccctagtgtcccgggaagccagcgataaggaaaaggttaaagaattgcccacccttaaggatatggactttctcaacaagaaccagaaagtatatattggtgaagaggagaagaaaatatttctggagaagctgaagagagatgtggagtttctagtgcagctgaagatcatggactacagccttctgctaggcatccacgacatcattcggggctctgaaccagaggaggaagcgcccgtgcgggaggatgagtcagaggtggatggggactgcagcctgactggacctcctgctctggtgggctcctatggcacctccccagagggtatcggaggctacatccattcccatcggcccctgggcccaggagagtttgagtccttcattgatgtctatgccatccggagtgctgaaggagccccccagaaggaggtctacttcatgggcctcattgatatccttacacagtatgatgccaagaagaaagcagctcatgcagccaaaactgtcaagcatggggctggggcagagatctctactgtccatccggagcagtatgctaagcgattcctggattttattaccaacatctttgcctaagagactgcctggttctctctgatgttcaaggtggtggggttctgagacacttgggggaattgtggggatattctagccaccagttctcttcttcctttgctaaattcaggctgcaggctccttccatccagataactccatcctgtcgagtaggctctttctgaccctcagaaatacattgtcctttttcctctttgcccatttttcttccctctcttcctccccatgagaagtctgcttgtagtattagaatgttattgttgactctctcccaagtgccttgatctttgtaatatctcctgttgtttctatgatataggagctaggggaagggggttgtttgccttcttcaggacctgactggacagatggacctggctcaagcaactactctggatgcactttgctgtgtgggatgaactaaaagtgtctgaattttgctgataactttataaaactcactatggcatgcttccctcctggtgggccctaggatggatgacactcaagatactacagatgtgggtgcaggcatgcacacacacgatggaatatggccattcctacacaggtggggtagagagtgggtcagcagcctggcacctcacagaggtgggacctaagaggactcatgattatgcagagaattggattgggtctctgtcatagattgagtaatctcttcccttacctcaattccatctccacccatctctacatctgggcacagcaacccagagatggccaaaagcattcaagcctgggggaagatgtttgactattgctgctcttcaccagaacctcacacctctcctgggactggaacccttcagtgggtgtgtggccagttttggaggctggaatgatgggccagggtgtaggattcattctccatgtaaagtttcctttcatcctgcctagccatccccaaggtttatttccagaagaaaggaatatctctacttggatcaattctggtcatttcaagaggatggaggcctcaagtgtgggaacttcccctactccctggatgtgtgtacctagcacacttccttctcccacccctttttccagttggatttgtttttctgttctcttctgtcctgtcttatactgcaactgtgtctcctaggggacagatggccttctttgtcatcttcactctccacccccagagaggagtcagagccataactcaatcactcagcccctccaaagatagttgatgtgtgataatctcataatgttgagaaccctgatgagatacattgtcttcctctccctacaatgcctctggggccaaggcacccattcttcttgctatcctccatcccccttgaggcttccactttttttttttttagacataaagctgggcatcagcaactggcctgtggtgatgcaaagctgctttgctctgtatctggctggactgatctgtctcacaagaagccatgaggccatagggagaagctccctctccccttcatcttctgctccaaaggtggtagcaagaggagtacccagttaggggttggagcccccatataacatcttcctgtcagaagactgatggatctttttcattccaaccatctccctttcccccgatgaatgcaataaaactctgtgacaccagcaaccattgctctttagaaatgggttttctgatcatatggctgatgtgttatgggcagtatggatgtcttcatttgttgcttctgtttttcatcttttttgttttattaataaaaatttatgtatttgctcctgttactataataatacagggaataaattattcaatccaaatttctgtacaaaaaaaaaaa

SEQ ID NO: 455 - DNA, 2713 bp, HOMO SAPIENS
gaagctgcagttctgccatcactcaagatggctgcccccatcaagatgaccggggtgtgccggggggaaaggggcagcatgatggtctgagatggtgtagcgtcggaccatgtggaagtttctgaggctggggagccggataatggggggtggggcccgttggggggtaaaggggcaatagcgtcctttcacaggctaacctcggctcttcccagtcctctggactaaaatggggaacacattgggcctggcaccaatggggactttgccccgccggagcccccgccgagaggaacccctgcccaaccctgggagcttcgatgagctgcaccgtctatgcaaagatgtattcccagcacagatggagggagtgaagctcgttgtcaacaaggttctgagcagccatttccaggtggcgcacactatacacatgagtgccctgggcttgccgggatatcacctccatgcggcctatgcaggggattggcagctcagtcccactgaggtgttccccactgtggtaggggatatggacagcagtggcagcctgaacgcccaggtcttgctcctcttggcagagcggctccgagctaaggctgtcttccagacgcagcaggccaagttcctgacatggcagtttgatggcgagtatcggggagatgactacacagccactctgaccctaggaaatcctgacctgattggggagtcggtgatcatggttgctcacttcctgcagagcctcactcatcggctggtgctgggaggagagctagtttatcaccggcggccaggcgaagagggggccatcttgacactggctgggaagtactcggctgtacactgggtagctacattgaatgtgggatcaggcggggcccatgcaagttactaccacagggcaaatgaacaggttcaggttggagtggagtttgaggcaaacacaaggctacaagacacaacattctcctttggttaccacctgactctgccccaggccaacatggtatttagaggcttggtggatagtaactggtgtgtaggtgctgtgctggagaagaagatgccccctctgcctgtcaccctagcccttggagccttcctcaatcactggcgcaacagattccattgtggcttcagcatcactgtgggctgaggttgtccagagccagcccccacagcagctggaacctctgagtcaggtgccctagggccaaagactaggcccctcttcagagcccaccttgctgggtgatctctaggacccaggagcagagtggtggacaggaccatgccctcctcagaactggagctgccacaggggcagttgatgaggcagaggtttgaggatcccccctctgctaccagccccagtatcaccttccccatgctcttgtggctgtggactaagggagaaggattaaggggtatggctgaattcccccggcaccccttgccctcaggcttccttcttcctttccctttggttaatcctgcatgggattagctgaccatcctgttttccatcccagagcctcccaaggctgggaaagtagggctgaagggctagatgtttggtctcaggaagtggggcccacccattcccagaaggagcttctttacctcttagccctgaggtttcctccttcccatcttctgtgcttccagagaacaactttgttcctatggtcacccccactatccccatgaccgcatgaagaggcagttattgctttagtctttcattgcaaccactgggctccctttgaacccggcccaatctttggtcccagcattttcccactccagtgtatccagggtgttccaggtgagctggggaaggaagtgagcatggcctcagctgcagatctcctggagcagcggcatcatggcagacaggccctggatgtgctggatttggtacccgtaggcctcattaatgctccggagctcagccagcaggcctagcaacttcgcatacagaaacctttggaggaagtagtggggttgccaggaaaacaggagggaaataaggcagttgggagtcttgtctctaggccctgatcccctgaactattcctcagtgaagccaggtctgaacattagagaaaatcatgctctggtatgacagactatcagaggttccaaaggtcctccagggggcctcggtctgacactgtcttctctcaccatgctcagttttttctgaacccagagctctgagagccgagtgtgaagaaagctccagacttggccagaactccaaccatgtggaatctgagggcctggccttctagagcaggttctagaaggtggatgtgttctatggtataaagcatcccctttctggccaaactagctcttggaggaacgagcaaaacagaagcggtgcatacctcagagcctggataaatcacagactattgaacctggaactggctttgaccatgaaactgtgaatggccctaacttcaagggaaatgagaaatcgaaggaattggcccaatggcgaggagaggaaaggccaagggaagagaaaagtctgcgttagtctggagaagttggactagtgaggtaatggatgtcatcaatctcaggaatgctattacccagagcctctgagctactactttgcatctgtactgaataaaaaaaaaatctggaaaaagtgagatgaaaaaaaaaaaaaaaaaaaaaaaaaaaaaaaaaaaaa

SEQ ID NO: 456 - DNA, 5464 bp, HOMO SAPIENS
aggcaacagcccggaagccgctggctgggttaacctgtggcgcgctccgcggttccggcgcctgaagttttagctgcggtggcggcggcagtcgggaccgactgcaaggcaggttgagatgatggatctgaggcttgcagctcgcagtcccaacgagccttagggaccagggctaccaaaagggtggggagaacggtggtggcatctgtctgttgcctgggatccaggcgcccggttggggaatccttacttcaggaagcgcagccgcggctctgtgttttgagagtgcaaatgtcatttgtcagagtgaaccgctgtggtccccgagttggtgtaagaaagacaccgaaagtaaagaagaagaaaacttcagtgaaacaagaatgggataataccgtgactgatctaaccgttcatcgggcaactcccgaagatctggtacgccgtcatgaaatacacaaatcgaagaatagagcattagtacactgggaactccaagaaaaagctttgaagagaaaatggaggaagcagaaaccagaaactttaaatcttgagaaaagaagattgtctatcatgaaggagattctttctgatcaataccagatgcaagatgtgttggagaaatctgatcatctaatagctgcagcaaaagagctgtttcctcgtaggcgcacagggtttccaaatgtaacagtggctcctgattcctctcagggtcccattgtggtaaatcaagaccctatcacccaatctatctttaatgagtctgtcatagaacctcaggctcttaatgatgtagatggtgaagaagaaggaactgttaatagccagtcaggagaaagtgagaatgagaatgagttggataactctctaaactctcagtctaacacgaatacagacaggtttctccaacaactaacagaagagaattttgagttaattagtaagttgtggactgacattcagcagaaaatagcaacccagtcacaaataactcctccaggaacgccatcatctgctctttcatcaggggagcaaagagctgctctgaatgctaccaatgctgtcaagagactccaaaccaggcttcagcctgaagaatctactgagactctagactcaagctacgttgtgggacacgtgctgaactcaaggaagcaaaaacagctgttaaataaagtgaaaaggaaaccgaatttgcatgctctttccaagccgaagaaaaacatatcatcaggtagcacaacctctgcagacttaccaaataggactaattccaacctggatgtcctcaaacacatgatacatgaagtggaacatgaaatggaagaatatgagcggtggacaggtcgcgaggtcaagggtctgcagagcagtcagggtcttacaggcttcactttgtcgctggtgagctccctctgtcgcctggttcggtaccttaaagagagtgagatccagctacgtaaagaagtagagacaaggcaacaactggaacaagtattaggtgatcatcgagagctcattgatgctctgacagctgaaattcttcgtcttagagaagaaaacgctgctacacaggcaagacttcagcagtacatggtcacaacagatgagcaactgatatcactcacacatgctattaagaactgtcctgtgataaataacagacaagaaattcaggcatcagaaagcggagccacaggtagaagagttatggacagtccagagcgtccagttgtaaatgccaatgtctcagtgccattgatgttcagagaggaagtggctgaattcccacaggaagagttgcccgttaaactgtctcaggtgccagaccctccagataacatgaatctggccaagaattttccagcacatatttttgagccagctgtgttgttaacaccacccaggcagaagagcaacttaaaattctctcctcttcaggacgtattgagaaggactgttcaaactcgtcctgctccacgacttcctccaactgtggaaataattgagaaggaacaaaattgggaagagaagaccttacctattgatacagacattcagaattcaagtgaagagaatcgtctcttcactcagagatggagagtctctcacatgggagaagatttggagaacaaaactcaggctccttttgttaacctctcacagcccctctgcaattcccattccaacactcaacagtcaagaagccccacattctcagaagagctcccagtactgggagatgggcagcagctgagaacaaatgagtcattaatacaaagaaaggacataatgacacgaattgctgatttgacattgcagaattcagctatcaaggcacatatgaataatattattgagcccagaggagagcaaggggatggactccgggagttgaacaaacaagaaagtgcaagtgacatgacttctacttttccagtagcacagtctctaacaccaggtagtatggaggaacggattgcagaattgaatcgacaaagtatggaggctcgtggaaaactactgcagttgatagagcagcagaaacttgttggtttgaatctttctccaccaatgtcacctgttcagttacctctcagagcatggactgaaggagcaaagaggacaattgaggtatctattccaggagcagaagccccagaaagctcaaaatgtagtactgtctctcccgtcagcgggataaatacaagaagatcttccggggctactggtaattcttgttctccactaaatgccacctcaggaagtgggagattcacacctcttaatccaagagcaaagattgagaaacagaatgaagaaggctggtttgctctttctacccatgtatcataagtgaagtcaagtctcactgagtttgttcttaataatttattacttccctttccctgctctgacttttaagtttttatatccttctttcagataaaacctacaaagatcctgtgaattagtactaatgaaacagagaaataaagcaattattttttgactttctcaaataagttttcaacaaccaactgacctacagctccctgtgaatgaaactttgactgtagagaagttaaagttttgtattttaatactttcttaagtattttaagggttttttttattaatacatttttacctttatctttattcagggttttttgaggtttagtatatcttagttgatccatttatttatttattttcctgaagaactaatttgctttgcatgtaacttacaataaaattcctctgtgtgattagagtctggctttcaggaatatgtaacacccacttttctttcttttttcttgggaagtcattgctgttcatcactttttccatcaagtgaaatatacagccttaaaaacaataggcctgggagtgtttgtttatatttgcttaagcaggtaagagtggttgcatttattataaaatcttatgtagtttttaaatgtgaaaatgtcatcaataatggtaatgcaaatcaaataaatatgattctagagctcaaatgcctaaatgtggtaacattgatttaatggtatatttaatgcttcaaacaattaaatagaaaaagttgctattaattttcccagccctgaatttaagcagatctttcagggtagatttctcttttttttttttttttgagacagagtcttgctttattgcccaggctggagtgcagttgtataatctggttcactgccacctcagtctcctgggttcaagcaatcctcttacctcagcctcctgagtagctaggattataggttcatgccaccacgcccagctaatttgtgtattttcagtagagacggggtttcaccatgttggccaggctgatctcgaactcctgacctcaaatgatccacctgccttggtttcccaaagtgccgggattacaggtgtgagccactgcacccggctcaggatagatttttcagggtacccttttggttctgagatgtttatttctattttaaacttgttttttgaatgatctctgctccctggctctatgataggaattctcaacctgagtgaacaattcaaactgagattacttgtgtttagactcatatattttgataacatatgacttctccagtatgccccagaaagctgctaataacttgctcaacctgaaatttacagttttccaaattacaggttggcagagatactggattgataacaacatccacagttatcatataatcattcttatgctgtaaacaaaattattttggttagcagaatttaataattaactgttaactacatactaggcaatattgtagccactttatgtgcttcatgacaccttatgggataggtactattatcctcattttgcagatgaggaaactgaggtacaaggaggtattttctcaaggtcacacaactagggagtggtggcattagaatgggaacataggcagtctttctccaaagcctatgctgtgctgcctcttgttggagagtaaacctgttttacagtgtgtgtagtatggaagcagcataataataagaatagctgttccttattgagccattactgtggcagacaccgtactataagctgtggtatcaccattatctcatttgaatctcatagtagacctatcagttagaggtatgtaaatgcttcctcctctcccagcacctttacagatgaggatgctgagccctagaggtgaagaaagttgtctaatgacagagtgcttgtaagaggtaaagccaagacttgaagctctttcttgcagttactggatttctcctaatttacgggaactaatacagtacagtagctaaggatgcaagtactgaaaccagaaatcttgcctcaaatgccatttctgccacttgagctgtgtactttggacaaattaatctaatctttcccatttgaaagtcagacataatgtcttccctagaggcttgtgaggattaagtgaggcaagtgtatgtaaatgggctgagatcagagcttggctcacaacactcagtaatgatcactgccaattttttttggtatataaataaataaatacactatttcccccatgtttccaatttttaagacattgtatagtgaatttattgtatctttctcagattaacaattgcacacagtgcttgaaatttagaggtatttcacctgaaaagatgtctagagattgaaagaaaacatgctgggcatatgatttgaaaatataaataacatgctatttaaaaataagtttaccctatgttttctatcttttctggcacctagatataccatttaataagtaatagcaaggataatcatttttttaagccctggaaaatcttgattaaagaggacatttcagtattgcaaataaatgcatggtatttgtgtaacattgtggaaactaataaacacaaattgtattatagcaaaaaaaaaaaaaaaaaa

SEQ ID NO: 457 - DNA, 2634 bp, HOMO SAPIENS
tcgggctccagccccgtccgcgcgtctcccggcgtgggtgcgggaccagggcgctgcggggcgcgcagggagctgccaaggccatgtctgttccatcatcactgagccagtcggccattaatgccaacagccacggaggccccgcactgagcctacccctgcctctgcacgctgcccacaaccagctgctcaacgccaagctgcaggccacagctgtgggacccaaggacctgcgcagcgccatgggggagggtggtgggcctgagccaggccctgccaatgccaagtggctaaaagagggccagaaccagctccggcgggccgccacggcccaccgtgaccagaatcgcaatgtgaccttgaccttggcggaggaggccagccaggagcctgagatggcacccttgggccccaaaggcctgatacacctgtactctgagctggagctctcagctcacaacgcagccaaccgaggcctacgaggacctggcctgatcatcagcactcaagagcaggggccagatgagggagaggagaaggcggccggggaggccgaggaggaggaggaggatgatgatgatgaagaggaggaggaggacttatcttctcccccagggctgcctgagcccctggagagtgtggaggcccctcccaggccccaagcccttacagatggcccccgggaacacagcaagagtgccagcctcctgtttggcatgcggaacagtgcagccagtgatgaggactcaagctgggctaccttatcccagggcagcccctcctatggctccccagaggacacagattccttctggaaccccaacgccttcgagacggattccgacctgccggctggatggatgagggtccaggacacctcagggacctattactggcacatcccaacagggaccacccagtgggaaccccccggccgggcctccccctcacaggggagcagcccccaagaggagtcccagctcacctggacaggttttgctcatggagaaggctttgaggatggagaattttggaaggatgaacccagtgatgaggccccaatggagctgggactgaaggaacctgaggaggggacgttgaccttcccagctcagagcctcagcccagagccgttgccccaagaggaggagaagcttcccccacggaataccaacccagggatcaagtgtttcgccgtgcgctccctaggctgggtagagatgaccgaggaggagctggcccctggacgcagcagtgtggcagtcaacaattgcatccgtcagctctcttaccacaaaaacaacctgcatgaccccatgtctgggggctggggggaaggaaaggatctgctactgcagctggaggatgagacactaaagctagtggagccacagagccaggcactgctgcacgcccaacccatcatcagcatccgcgtgtggggcgtcgggcgggacagtggaagggactttgcctacgtagctcgtgataagctgacccagatgctcaagtgccacgtgtttcgctgtgaggcacctgccaagaacatcgccaccagcctgcatgagatctgctctaagatcatggccgaacggcgtaatgcccgctgcttggtaaatggactctccctggaccactctaaacttgtggatgtccctttccaagtggaattcccagcgcctaagaatgagttggtccagaagttccaagtctattacctggggaatgtacctgttgctaaacctgttggggtagatgtgattaatggggccctcgagtcagtcctgtcctccagcagccgtgaacaatggaccccaagtcatgtcagtgtggcccctgctaccctcaccatcttgcaccagcagacagaggcagtgctgggagagtgtcgggtgcgtttcctctccttcctggccgtgggcagagatgtccacacgtttgcattcatcatggctgccggcccagcctccttctgctgccacatgttctggtgcgagcccaatgctgccagcctctcagaggctgtgcaggctgcgtgcatgcttcgctaccagaagtgtctggatgcccgttcccaggcctccacctcctgcctcccagcaccccctgctgagtctgtggcacggcgtgtagggtggactgtccgcaggggtgttcagtcgctgtggggctccctgaagcccaaacggctgggggcccataccccatgaagaagcccccaccttccctccacctgcttgtgttgggccccagggaactaaagggtgtgggtcagggaggggtctagaggctattcctaggcctcaggcctcccaaatatgcccctccccagtagctacggttccctgcctaggagctggggagggagagatctaatcccttcaaggaagtgataacactggagtggtaacaagaggagcaggaagcaaggccagccctggttctccatccccatgtgtttcaggtggaacaggaggaactggtccaggccaggcctcatcctcctggacccagcaggggcagaaggaggaagggactggtccaggcatgggtcccttccccctgctccatgggcacctctgctgtattgatatcactaataaagtctgtctgcactgcaaaaaaaaaaaaaaa

SEQ ID NO: 458 - DNA, 15882 bp, HOMO SAPIENS
gaagatggcgacgagcggcggcgaagaggcggcggcagcggctccggcgccggggaccccggcaacgggggcggacacgaccccgggctgggaggtggctgtgcggcccctgctgtccgcgtcctactccgccttcgagatgaaggagttgccgcagctggtggcctcagtcatcgagagtgaatcagaaatcctgcaccatgagaagcagtacgagccattctactcatcttttgttgcactttccacacactatattacaacagtttgcagtctcattccccggaaccaacttcagtcagtggcagcagcctgtaaagttctaattgagttttctctcctgcgtctggagaatccagatgaggcttgtgctgtgtcccagaaacacttgattctcctaatcaagggcctgtgcactggctgtagccgactagatagaactgaaattatcacatttacagcaatgatgaaatccgccaagctgccccaaacagtgaagacactttcagacgtggaagatcagaaagagctggcctcaccagtaagccctgagttgaggcaaaaggaggtacagatgaattttttgaaccagctgacctcagtttttaaccctagaactgtagcatcacaacctatcagtacacagactctggtggaaggagaaaatgatgagcagtcatctacagatcaagcctcagctatcaaaaccaagaatgtgttcatagctcagaacgtggctagtcttcaagagcttggtggctcggagaagctactgcgtgtatgtttgaacctgccatatttcctacgctatatcaatcggttccaagatgcagttttagctaattccttcttcataatgcctgcaacagtagcagatgccactgctgttcgtaatggctttcattcattggtgattgatgtaactatggcattggataccctttctctacctgtgttggaacctctcaatccttctcgtctacaagatgtgacagtcctcagcctaagttgtctgtatgcaggtgtgagtgtggcaacgtgcatggccatcctccatgtgggtagtgcccagcaagtgcggacagggtccacgagctccaaagaagatgactatgaaagtgacgcagctacaattgtccagaaatgtctcgaaatctatgacatgattggacaagcaatcagcagttctcgccgggctggtggtgagcactatcagaatttccaattgctgggtgcttggtgcttgttaaacagccttttcctcatactgaacctcagtcctactgcgttggctgataaggggaaagagaaggacccactggctgccctccgagtcagagacatcctttctcgtactaaagagggagtgggctcccctaaactggggcctggaaaagggcatcagggatttggggtactctcagtaatattggcaaaccatgccatcaaactgctaacgtctctctttcaagacctacaagtggaggcccttcacaagggttgggagacagatggcccccctgcagccttgagcattatggcccagagcacctccatacagaggattcaacggctgattgactctgtcccactgatgaacctgctcttgacgttactttcaacttcctacagaaaggcatgtgtcctgcagcggcagaggaagggctccatgagcagcgatgccagcgcctccaccgactccaatacttactatgaggacgatttcagtagcacggaggaggacagcagccaagacgatgacagtgagcctattttggggcaatggtttgaggagactatttctcccagtaaagagaaagcagcacctccgcctcctcccccacctcctccactggaaagctctcctcgggttaaaagccccagtaagcaggcccctggtgagaagggcaacattctggcgagtcgcaaagatcctgagttgttcttaggtctggcttccaacattttgaacttcatcacctcttccatgctgaactctcggaacaattttatccgaaactatctgagtgtatctctttcagaacaccatatggccaccctagccagtatcatcaaggaggtggacaaagatggactcaagggttcatcagatgaagagtttgctgcagctctctatcacttcaaccactcactggtaacctctgaccttcagtcacctaacctgcagaacacactgttgcagcagctaggagtggctcctttttctgagggcccttggcccttgtacattcaccctcaaagcctctctgtgctttcacgcctcctgctcatctggcaacataaagccagtgctcaaggtgaccctgacgtcccagaatgccttaaagtttgggacaggtttttgtctacaatgaagcagaatgccctgcaaggtgtggtgcccagtgagacagaggatctgaatgtagaacacctgcagatgctcctcctcattttccacaatttcaccgagacaggccggcgggccatattgtcgctttttgtccagatcatccaggagttgagcgtcaacatggatgctcagatgcgcttcgtgccgcttatcttggctcgcctccttctcatctttgattatctgcttcatcagtactccaaagcccctgtgtatctatttgagcaggtacagcataacctgctaagtcctccctttgggtgggcaagtggatcccaggacagcaacagccgccgggcaaccactcctctctatcatggattcaaagaagtagaagaaaactggtctaagcatttctcatcagatgctgtcccacaccccagattctactgtgtcctgtccccagaagcctcagaggatgatttgaaccgacttgattctgtggcatgtgacgtccttttctccaagcttgtcaagtatgatgagctttatgctgcactgacagccctgcttgcagctgggtcccagcttgatacagttaggagaaaggaaaacaagaatgtaacagccttggaggcctgtgcccttcaatattacttcttgatactgtggaggatcctaggaattttaccaccatcaaagacttacattaaccagctatccatgaactcacctgagatgagcgaatgtgacatcttgcacactctgcgatggtcttctcggctccggatcagctcctatgtcaactggataaaggatcaccttatcaaacagggaatgaaggctgagcatgctagctcgcttctagaactggcatccaccactaagtgtagctcagtgaaatatgatgttgaaatagtagaggaatacttcgctcgacagatctcatccttctgtagtatcgactgtaccaccatcttgcagctgcatgaaattcccagtctgcagtccatctacacccttgatgccgcgatctcaaaggtccaggtctctttggatgagcatttttctaagatggctgctgagactgatcctcataagtcgtctgagattaccaagaacctacttccagccacgctgcaactcattgacacctatgcatcgttcaccagagcctatttgctgcaaaactttaatgaagagggaacaactgagaaaccttccaaggagaaactgcaaggctttgctgctgttttggctattggctctagcaggtgcaaggcaaatactctgggtccgacactggttcagaatttgccatcgtcagtgcagactgtgtgtgagtcctggaacaacatcaataccaatgaatttcccaatattggatcctggcgcaatgcctttgccaatgacaccatcccttcagagagttatattagtgcagtgcaggctgcacacctggggactctctgtagccaaagtctgcccctggctgcttccctgaagcataccctcctctcactggtcaggttgactggagatcttattgtttggtcagatgagatgaacccaccacaggtaattcggacactgctacctcttcttttggaatcaagcactgagagtgttgccgagatcagtagcaactccctggaacgcatcttgggccctgctgagtctgatgagttcttggctcgtgtttatgagaagctgatcactggttgttacaacattctggccaatcatgcagatcctaacagtggactggatgaatccatcctggaggaatgtctccagtacttggaaaagcagctggaaagtagccaggctcgtaaagctatggaggagtttttctctgacagtggagaacttgtacagatcatgatggcaacagccaatgagaacctctctgctaaattctgtaaccgagttttgaaattcttcaccaaactcttccagctgactgagaagagccctaacccgagcctgttgcatctctgtggctccctggcacaactggcctgtgtggaacctgtgcgcctgcaggcctggctcacccgcatgactacatcgcccccaaaagattctgatcagctggatgtaattcaggagaaccggcagctgctgcagttactgaccacatacattgttcgggaaaacagccaagttggggaaggtgtgtgtgctgttcttctgggcaccctgactcccatggcaacagagatgctggccaacggtgatgggactggcttccctgaacttatggttgtgatggccactctggccagtgcaggtcaaggtgctggtcaccttcagcttcataatgctgctgtggattggctgagcagatgcaagaaatacctgtcacagaagaatgtagttgaaaaactgaatgccaatgtaatgcatggaaagcatgtgatgatcttggagtgcacatgccatatcatgtcttacttggctgatgtcacgaatgccctgagccagagtaatggtcaaggcccaagtcatctctcagtggatggggaagagcgggccattgaagtagactcagactgggtggaggagttggcggtggaagaggaagattcccaggctgaggattcagatgaagattctctttgcaataaactctgcacttttacgatcacacagaaagaattcatgaaccagcattggtaccactgtcacacctgtaaaatggtggatggcgtgggtgtctgcacagtgtgtgctaaggtgtgccacaaggatcatgagatttcctatgccaagtatggatccttcttctgtgactgtggagccaaggaagatggcagctgtttggctctggtgaagagaactcctagcagtggcatgagctctaccatgaaggagtcggcatttcagagtgaacccaggatttcagagagtctagtgcgtcatgccagcacctcctcgccagctgacaaagccaaggttaccatcagtgatggaaaggttgctgacgaagagaagcccaagaagagcagcctctgccgcacagtagagggctgccgggaggaattacagaaccaggccaatttctccttcgctcctctcgtgttagacatgcttaatttccttatggatgccattcagaccaacttccagcaagcttcagccgtcgggagcagcagccgtgctcagcaagccctcagtgagctacacactgtggagaaggcagtggagatgacagaccagctgatggttcccaccttagggtcccaggaaggtgcctttgagaatgtgcggatgaattacagtggagaccagggccagaccatccggcagctgatcagtgctcatgtgctcaggcgggtggctatgtgtgtgctctcctctccccatgggcgccgccaacatttggctgtcagccatgagaagggcaagatcaccgttctgcagctctctgcactcctgaagcaagcagattccagcaaaaggaagttaactctgacccgcttggcttctgccccagttccttttactgtgttgagcctcacaggaaatccctgcaaggaagactacttggcggtttgtgggctaaaggactgtcatgtgctcacctttagtagctcaggctctgtttcggatcacttggttttgcaccctcagttggcaacggggaacttcatcatcaaagccgtgtggttacctggttcacagaccgagttagcaattgtcaccgcagactttgttaagatttatgacctgtgtgttgatgccttgagtccaaccttctattttctcctgccaagctcaaagataagagatgttaccttccttttcaatgaggagggaaagaacatcattgttataatgtcttcggctgggtacatctatactcagcttatggaagaggccagcagtgcccagcagggacccttctatgtcactaatgtgttggaaatcaatcatgaggacctgaaggacagtaacagccaggtggcgggcggtggtgtgtccgtgtactactcccacgtgttgcagatgttgttcttcagctattgtcaaggcaaatcattcgcagccaccatcagcaggacaaccctggaggtgttgcaactcttccccatcaacatcaaaagttccaatggtggcagtaagacttctcctgctctttgccagtggtctgaggtgatgaaccaccctggcttggtgtgctgtgtccagcaaactacaggggtgccgctggtagttatggtgaaaccagacacttttcttatccaggagattaagactcttcctgctaaagcgaagatccaagacatggttgctattaggcacacggcctgcaatgagcagcagcggacaacaatgattctgctgtgtgaggatggcagcctgcgcatttacatggccaacgtggagaacacctcctactggctgcagccatccctgcagcccagcagtgtcatcagcatcatgaagcctgttcgaaagcgcaaaacagctacaatcacaacccgcacgtctagccaggtgactttccccattgacttttttgaacacaaccagcagctgacagatgtggagtttggtggtaacgacctcctacaggtctataatgcacaacagataaaacaccggctgaattccactggcatgtatgtggccaacaccaagcccggaggcttcaccattgagattagtaacaacaatagcactatggtgatgacaggcatgcggatccagattgggactcaagcaatagaacgggccccgtcatatatcgagatcttcggcagaactatgcagctcaacctgagtcgctcacgctggtttgacttccccttcaccagagaagaagccctgcaggctgataagaagctgaacctcttcattggggcctcggtggatccagcaggtgtcaccatgatagatgctgtaaaaatttatggcaagactaaggagcagtttggctggcctgatgagcccccagaagaattcccttctgcctctgtcagcaacatctgcccttcaaatctgaaccagagcaacggcactggagatagcgactcagctgcccccactacgaccagtggaactgtcctggagaggctggttgtgagttctttagaagccctggaaagctgctttgccgttggcccaatcatcgagaaggagagaaacaagaatgctgctcaggagctggccactttgctgttgtccctgccagcacctgccagtgtccagcagcagtccaagagccttctggccagcctgcacaccagccgctcggcctaccacagccacaaggatcaggccttgctgagcaaagctgtgcagtgtctcaacacatctagcaaagagggcaaggatttggaccctgaggtgttccagaggctagtgatcacagctcgctccattgccatcatgcgccccaacaaccttgtccactttacggagtcaaagctgccccagatggaaacagaaggaatggatgaagggaaggaaccgcagaagcagttggaaggagattgctgtagtttcatcacccagcttgtgaaccacttctggaaactccatgcatccaaacccaagaatgccttcttggcacctgcctgccttccaggactaactcatattgaagctactgtcaatgctctggtggacatcatccatggctactgtacctgtgagctggattgtattaacacagcatccaagatctacatgcagatgctcttgtgtcctgatcctgctgtgagcttctcttgtaaacaagctctaattcgagtcctaaggcccaggaacaaacggagacatgtgactttaccctcttcccctcgaagcaacactccaatgggagacaaggatgatgatgacgatgatgatgcagatgagaaaatgcagtcatcagggatcccgaatggtggtcacatccgtcaggaaagccaggaacagagtgaggtggaccatggagattttgagatggtgtctgagtcgatggtcctggagacagctgaaaatgtcaacaatggcaacccctctcccctggaggccctgctggcaggcgcagagggcttcccccccatgctggacatcccacctgatgcagatgacgagaccatggttgaactagccattgccctgagcctgcagcaggaccaacaaggcagcagcagcagtgccctgggcctgcagagcctgggactgtccggccaggcacccagctcttcctctctggacgcaggaaccctctctgacaccacagcatcagctccagcctcagacgacgagggcagtacagcagcgacagatggttctacccttcggacctctcctgctgaccacggtggtagtgtgggctcggagagcgggggcagtgcagtggactcagtggctggcgagcacagtgtatctggccggagcagtgcttatggcgatgctacagctgaggggcatccggctggaccaggaagtgtcagctcaagcactggagccatcagcaccaccactgggcaccaggagggagatggctccgagggagaaggagaaggagaaactgaaggagatgtccacactagcaacaggctgcacatggtccgtctaatgctgttggagagattactgcagaccctgcctcaattacgaaacgttggcggtgtccgggccatcccatacatgcaggtcattctaatgctcactacagatctggatggagaagatgagaaagacaagggggccctagacaacctgctctcccagcttattgctgagttgggtatggataaaaaggatgtctccaagaagaatgagcgcagcgccctgaatgaagtccatctggtagtaatgagactcctgagtgtcttcatgtcccgcaccaaatctggatccaagtcttccatatgtgagtcatcttccctcatctccagtgccacagcagcagctctactgagctctggggctgtggactactgcctgcacgtgctcaaatcactgctggaatattggaagagccaacagaatgacgaggagcctgtggctaccagccagttgctgaaaccacatactacctcctccccacctgacatgagcccattctttctccgccagtatgtgaagggtcatgctgctgatgtgtttgaggcctatactcagcttctaacagaaatggtactgaggcttccttaccaaatcaaaaagattactgacaccaattctcgaatcccacctcctgtctttgaccactcgtggttttactttctctccgagtacctcatgatccagcagactccatttgtgcgccgtcaagtccgcaaacttctgctcttcatctgtggatccaaagagaagtaccgccagctccgggatttgcacaccctggactctcacgtgcgtgggatcaagaagctgctagaagagcaggggatattcctccgggcaagtgtggttacagccagctcaggctccgccttgcaatatgacacactcatcagcctgatggagcacctgaaagcctgtgcagagattgccgcccagcgaaccatcaactggcagaaattctgcatcaaagatgactccgtcctgtacttcctcctccaagtcagtttccttgtggatgagggcgtgtccccagtgctgctgcaactgctctcctgtgctctgtgcggcagcaaggtgctcgctgcactggcagcctcttcgggatcctccagtgcttcttcctcctcagcccctgtggctgccagttctggacaagccacaacacagtccaagtcttccactaaaaagagcaagaaagaagaaaaagaaaaggagaaagatggtgagacctctggcagccaggaggaccagctgtgcacagctctggtgaaccagctgaacaaatttgccgataaggaaaccctgatccagttcctgcgttgtttcctgttagagtccaattcttcctcggtgcgctggcaggcccactgtctgacactgcacatctacagaaattccagcaaatctcaacaggagctcctgctagatctgatgtggtccatctggccagaactcccagcctatggtcgtaaggctgcccagtttgtggacctactaggatatttctccctgaaaactccacaaacagagaagaagttgaaggagtattcacagaaggctgtggagattctgcggactcaaaaccatattcttaccaaccaccccaactcgaacatttataacactttgtctggcttagtggagtttgatggctattacctggagagcgatccctgcctggtgtgtaataacccggaagtaccgttctgttatatcaagctgtcttccattaaagtggacacgcggtacaccaccacccagcaggttgtgaagctcattggcagtcacaccatcagcaaagtgacagtgaaaatcggggatctgaaacggaccaagatggtgcggaccatcaacctgtattataacaaccgaaccgtgcaggccatcgtggagttgaaaaacaagccagctcgctggcacaaagccaagaaggttcagctgacccctggacagacagaggtgaagattgacctgccgttgcccattgtggcctccaatctgatgattgagtttgcagacttctatgaaaactaccaggcctccacagagaccctgcagtgccctcgctgtagtgcctcggtccctgccaacccaggagtctgtggcaactgtggagagaatgtgtaccagtgtcacaaatgcagatccatcaactacgatgaaaaggatcccttcctctgcaatgcctgtggcttctgtaaatatgcccgcttcgacttcatgctctatgccaagccttgctgtgcagtggatcccattgagaatgaagaagaccggaagaaggctgtatccaacatcaatacacttttggacaaagctgatcgagtgtatcatcagctgatgggacaccggccacagctggagaacctgctctgcaaagtgaatgaggcagctccagaaaagccacaggatgactcaggaacagcagggggcatcagctccacttctgccagtgtgaatcgttacatcctgcagttggctcaggagtattgtggagactgcaagaactcttttgatgaactctccaaaatcatccagaaagtctttgcttcgcgcaaagagttgttggaatatgacctacagcagagggaagcagccactaaatcatcccggacctccgtgcagcccacattcactgccagccagtaccgtgccttatccgtcctgggctgtggccacacatcctccaccaagtgctatggctgcgcctcggctgtcacagaacattgtatcacactacttcgggccctggccaccaacccagccttgaggcacatccttgtctcccagggccttatccgggagctctttgattataatcttcgccgaggggctgcggccatgcgggaggaggtccgccagctcatgtgcctcctaactcgagacaacccagaagccacccaacagatgaatgacctgattattggcaaggtctccacagccctgaagggccactgggccaaccccgatctggcaagtagcctgcagtatgaaatgctgctgctgacggattctatctccaaggaggacagctgctgggagctccggttacgctgtgctctcagccttttcctcatggctgtgaacattaagactcctgtggtggttgaaaacattaccctcatgtgcctgaggatcttgcagaagctgataaaaccacctgctcccactagcaagaagaacaaggatgtccccgttgaggccctcaccacggtgaagccatactgcaatgagatccatgcccaggctcaactgtggctcaagagagaccccaaggcatcctatgatgcctggaagaagtgtcttcctatcagagggatagatggcaatgggaaagcccccagcaaatcagagctccgccatctctatttgactgagaagtatgtgtggaggtggaaacagttcctgagtcgtcgggggaagaggacctcccccttggatctcaaactggggcataacaactggctgcgacaagtgcttttcactccagcaacgcaggccgcacggcaggcagcctgtaccattgtggaagctctagccaccattcccagccgcaagcagcaggtcctggacctgcttaccagttacctggatgagctgagcatagctggggagtgtgcagctgagtacctggctctctaccagaagctcatcacttctgcgcactggaaagtctacttggcagctcggggagtcctaccctatgtgggcaacctcatcaccaaggaaatagctcgtctgctggccctggaggaggctaccctgagtaccgatctgcagcagggttatgcccttaaaagtctcacaggccttctctcctcctttgttgaggtggaatccatcaaaagacattttaaaagtcgcttggtgggtactgtgctgaatggatacctgtgcttgcggaagctggtggtgcagaggaccaagctgatcgatgagacgcaggacatgctgctggagatgctggaggacatgaccacaggtacagaatcagaaaccaaggccttcatggctgtgtgcattgagacagccaagcgctacaatctggatgactaccggaccccggtgttcatcttcgagaggctctgcagcatcatttatcctgaggagaatgaagtcactgagttctttgtgaccctggagaaggatccccaacaagaagacttcttacagggcaggatgcctgggaacccgtatagcagcaatgagccaggcatcgggccgctgatgagggatataaagaacaagatttgccaggactgtgacttagtggccctcctggaagatgacagtggcatggagcttctagtgaacaataaaatcattagtttggaccttcctgtggctgaagtttacaagaaagtctggtgtaccacgaatgagggagagcccatgaggattgtttatcgtatgcgggggctgctgggcgatgccacagaggagttcattgagtccctggactctactacagatgaagaagaagatgaagaagaagtgtataaaatggctggtgtgatggcccagtgtgggggcctggaatgcatgcttaacagactcgcagggatcagagatttcaagcagggacgccaccttctaacagtgctactgaaattgttcagttactgcgtgaaggtgaaagtcaaccggcagcaactggtcaaactggaaatgaacaccttgaacgtcatgctggggaccctaaacctggcccttgtagctgaacaagaaagcaaggacagtgggggtgcagctgtggctgagcaggtgcttagcatcatggagatcattctagatgagtccaatgctgagcccctgagtgaggacaagggcaacctcctcctgacaggtgacaaggatcaactggtgatgctcttggaccagatcaacagcacctttgttcgctccaaccccagtgtgctccagggcctgcttcgcatcatcccgtacctttcctttggagaggtggagaaaatgcagatcttggtggagcgattcaaaccatactgcaactttgataaatatgatgaagatcacagtggtgatgataaagtcttcctggactgcttctgtaaaatagctgctggcatcaagaacaacagcaatgggcaccagctgaaggatctgattctccagaaggggatcacccagaatgcacttgactacatgaaaaagcacatccctagcgccaagaatttggatgccgacatctggaaaaagtttttgtctcgcccagccttgccatttatcctaaggctgcttcggggcctggccatccagcaccctggcacccaggttctgattggaactgattccatcccgaacctgcataagctggagcaggtgtccagtgatgagggcattgggaccttggcagagaacctgctggaagccctgcgggaacaccctgacgtaaacaagaagattgacgcagcccgcagggagacccgggcagagaagaagcgcatggccatggcaatgaggcagaaggccctgggcaccctgggcatgacgacaaatgaaaagggccaggtcgtgaccaagacagcactcctgaagcagatggaagagctgatcgaggagcctggcctcacgtgctgcatctgcagggagggatacaagttccagcccacaaaggtcctgggcatttataccttcacgaagcgggtagccttggaggagatggagaataagccccggaaacagcagggctacagcaccgtgtcccacttcaacattgtgcactacgactgccatctggctgccgtcaggttggctcgaggccgggaagagtgggagagtgccgccctgcagaatgccaacaccaagtgcaacgggctccttccggtctggggacctcatgtccctgaatcagcttttgccacttgcttggcaagacacaacacttacctccaggaatgtacaggccagcgggagcccacgtatcagctcaacatccatgacatcaaactgctcttcctgcgcttcgccatggagcagtcgttcagcgcagacactggcgggggcggccgggagagcaacatccacctgatcccgtacatcattcacactgtgctttacgtcctgaacacaacccgagcaacttcccgagaagagaagaacctccaaggctttctggaacagcccaaggagaagtgggtggagagtgcctttgaagtggacgggccctactatttcacagtcttggcccttcacatcctgccccctgagcagtggagagccacacgtgtggaaatcttgcggaggctgttggtgacctcgcaggctcgggcagtggctccaggtggagccaccaggctgacagataaggcagtgaaggactattccgcttaccgttcttcccttctcttttgggccctcgtcgatctcatttacaacatgtttaagaaggtgcctaccagtaacacagagggaggctggtcctgctctctcgctgagtacatccgccacaacgacatgcccatctacgaagctgccgacaaagccctgaaaaccttccaggaggagttcatgccagtggagaccttctcagagttcctcgatgtggccggtcttttatcagaaatcaccgatccagagagcttcctgaaggacctgttgaactcagtcccctgaccaccacacagcagctgcggcggcgaagacgaagctggcttgccttccaccctctgttctccctccttgtgcattaagttccctccgcgggatgctgcattgttaccccgccctcccctctctcatttttcttggtgtggcttggggtttttaggcttcctgttttatctcgtgtgtgtggtgcaccagctatgaggttgtctgtaacccaagccatcaaagggcctgtacatacctaggagccatgagttgtcccggccagcttcatacttgagtgtgcacatcttgagaaataaacaagtgacttaacacacattgaaaaggaa

SEQ ID NO: 459 - DNA, 15886 bp, HOMO SAPIENS
gaagatggcgacgagcggcggcgaagaggcggcggcagcggctccggcgccggggaccccggcaacgggggcggacacgaccccgggctgggaggtggctgtgcggcccctgctgtccgcgtcctactccgccttcgagatgaaggagttgccgcagctggtggcctcagtcatcgagagtgaatcagaaatcctgcaccatgagaagcagtacgagccattctactcatcttttgttgcactttccacacactatattacaacagtttgcagtctcattccccggaaccaacttcagtcagtggcagcagcctgtaaagttctaattgagttttctctcctgcgtctggagaatccagatgaggcttgtgctgtgtcccagaaacacttgattctcctaatcaagggcctgtgcactggctgtagccgactagatagaactgaaattatcacatttacagcaatgatgaaatccgccaagctgccccaaacagtgaagacactttcagacgtggaagatcagaaagagctggcctcaccagtaagccctgagttgaggcaaaaggaggtacagatgaattttttgaaccagctgacctcagtttttaaccctagaactgtagcatcacaacctatcagtacacagactctggtggaaggagaaaatgatgagcagtcatctacagatcaagcctcagctatcaaaaccaagaatgtgttcatagctcagaacgtggctagtcttcaagagcttggtggctcggagaagctactgcgtgtatgtttgaacctgccatatttcctacgctatatcaatcggttccaagatgcagttttagctaattccttcttcataatgcctgcaacagtagcagatgccactgctgttcgtaatggctttcattcattggtgattgatgtaactatggcattggataccctttctctacctgtgttggaacctctcaatccttctcgtctacaagatgtgacagtcctcagcctaagttgtctgtatgcaggtgtgagtgtggcaacgtgcatggccatcctccatgtgggtagtgcccagcaagtgcggacagggtccacgagctccaaagaagatgactatgaaagtgacgcagctacaattgtccagaaatgtctcgaaatctatgacatgattggacaagcaatcagcagttctcgccgggctggtggtgagcactatcagaatttccaattgctgggtgcttggtgcttgttaaacagccttttcctcatactgaacctcagtcctactgcgttggctgataaggggaaagagaaggacccactggctgccctccgagtcagagacatcctttctcgtactaaagagggagtgggctcccctaaactggggcctggaaaagggcatcagggatttggggtactctcagtaatattggcaaaccatgccatcaaactgctaacgtctctctttcaagacctacaagtggaggcccttcacaagggttgggagacagatggcccccctgcagccttgagcattatggcccagagcacctccatacagaggattcaacggctgattgactctgtcccactgatgaacctgctcttgacgttactttcaacttcctacagaaaggcatgtgtcctgcagcggcagaggaagggctccatgagcagcgatgccagcgcctccaccgactccaatacttactatgaggacgatttcagtagcacggaggaggacagcagccaagacgatgacagtgagcctattttggggcaatggtttgaggagactatttctcccagtaaagagaaagcagcacctccgcctcctcccccacctcctccactggaaagctctcctcgggttaaaagccccagtaagcaggcccctggtgagaagggcaacattctggcgagtcgcaaagatcctgagttgttcttaggtctggcttccaacattttgaacttcatcacctcttccatgctgaactctcggaacaattttatccgaaactatctgagtgtatctctttcagaacaccatatggccaccctagccagtatcatcaaggaggtggacaaagatggactcaagggttcatcagatgaagagtttgctgcagctctctatcacttcaaccactcactggtaacctctgaccttcagtcacctaacctgcagaacacactgttgcagcagctaggagtggctcctttttctgagggcccttggcccttgtacattcaccctcaaagcctctctgtgctttcacgcctcctgctcatctggcaacataaagccagtgctcaaggtgaccctgacgtcccagaatgccttaaagtttgggacaggtttttgtctacaatgaagcagaatgccctgcaaggtgtggtgcccagtgagacagaggatctgaatgtagaacacctgcagatgctcctcctcattttccacaatttcaccgagacaggccggcgggccatattgtcgctttttgtccagatcatccaggagttgagcgtcaacatggatgctcagatgcgcttcgtgccgcttatcttggctcgcctccttctcatctttgattatctgcttcatcagtactccaaagcccctgtgtatctatttgagcaggtacagcataacctgctaagtcctccctttgggtgggcaagtggatcccaggacagcaacagccgccgggcaaccactcctctctatcatggattcaaagaagtagaagaaaactggtctaagcatttctcatcagatgctgtcccacaccccagattctactgtgtcctgtccccagaagcctcagaggatgatttgaaccgacttgattctgtggcatgtgacgtccttttctccaagcttgtcaagtatgatgagctttatgctgcactgacagccctgcttgcagctgggtcccagcttgatacagttaggagaaaggaaaacaagaatgtaacagccttggaggcctgtgcccttcaatattacttcttgatactgtggaggatcctaggaattttaccaccatcaaagacttacattaaccagctatccatgaactcacctgagatgagcgaatgtgacatcttgcacactctgcgatggtcttctcggctccggatcagctcctatgtcaactggataaaggatcaccttatcaaacagggaatgaaggctgagcatgctagctcgcttctagaactggcatccaccactaagtgtagctcagtgaaatatgatgttgaaatagtagaggaatacttcgctcgacagatctcatccttctgtagtatcgactgtaccaccatcttgcagctgcatgaaattcccagtctgcagtccatctacacccttgatgccgcgatctcaaaggtccaggtctctttggatgagcatttttctaagatggctgctgagactgatcctcataagtcgtctgagattaccaagaacctacttccagccacgctgcaactcattgacacctatgcatcgttcaccagagcctatttgctgcaaaactttaatgaagagggaacaactgagaaaccttccaaggagaaactgcaaggctttgctgctgttttggctattggctctagcaggtgcaaggcaaatactctgggtccgacactggttcagaatttgccatcgtcagtgcagactgtgtgtgagtcctggaacaacatcaataccaatgaatttcccaatattggatcctggcgcaatgcctttgccaatgacaccatcccttcagagagttatattagtgcagtgcaggctgcacacctggggactctctgtagccaaagtctgcccctggctgcttccctgaagcataccctcctctcactggtcaggttgactggagatcttattgtttggtcagatgagatgaacccaccacaggtaattcggacactgctacctcttcttttggaatcaagcactgagagtgttgccgagatcagtagcaactccctggaacgcatcttgggccctgctgagtctgatgagttcttggctcgtgtttatgagaagctgatcactggttgttacaacattctggccaatcatgcagatcctaacagtggactggatgaatccatcctggaggaatgtctccagtacttggaaaagcagctggaaagtagccaggctcgtaaagctatggaggagtttttctctgacagtggagaacttgtacagatcatgatggcaacagccaatgagaacctctctgctaaattctgtaaccgagttttgaaattcttcaccaaactcttccagctgactgagaagagccctaacccgagcctgttgcatctctgtggctccctggcacaactggcctgtgtggaacctgtgcgcctgcaggcctggctcacccgcatgactacatcgcccccaaaagattctgatcagctggatgtaattcaggagaaccggcagctgctgcagttactgaccacatacattgttcgggaaaacagccaagttggggaaggtgtgtgtgctgttcttctgggcaccctgactcccatggcaacagagatgctggccaacggtgatgggactggcttccctgaacttatggttgtgatggccactctggccagtgcaggtcaaggtgctggtcaccttcagcttcataatgctgctgtggattggctgagcagatgcaagaaatacctgtcacagaagaatgtagttgaaaaactgaatgccaatgtaatgcatggaaagcatgtgatgatcttggagtgcacatgccatatcatgtcttacttggctgatgtcacgaatgccctgagccagagtaatggtcaaggcccaagtcatctctcagtggatggggaagagcgggccattgaagtagactcagactgggtggaggagttggcggtggaagaggaagattcccaggctgaggattcagatgaagattctctttgcaataaactctgcacttttacgatcacacagaaagaattcatgaaccagcattggtaccactgtcacacctgtaaaatggtggatggcgtgggtgtctgcacagtgtgtgctaaggtgtgccacaaggatcatgagatttcctatgccaagtatggatccttcttctgtgactgtggagccaaggaagatggcagctgtttggctctggtgaagagaactcctagcagtggcatgagctctaccatgaaggagtcggcatttcagagtgaacccaggatttcagagagtctagtgcgtcatgccagcacctcctcgccagctgacaaagccaaggttaccatcagtgatggaaaggttgctgacgaagagaagcccaagaagagcagcctctgccgcacagtagagggctgccgggaggaattacagaaccaggccaatttctccttcgctcctctcgtgttagacatgcttaatttccttatggatgccattcagaccaacttccagcaagcttcagccgtcgggagcagcagccgtgctcagcaagccctcagtgagctacacactgtggagaaggcagtggagatgacagaccagctgatggttcccaccttagggtcccaggaaggtgcctttgagaatgtgcggatgaattacagtggagaccagggccagaccatccggcagctgatcagtgctcatgtgctcaggcgggtggctatgtgtgtgctctcctctccccatgggcgccgccaacatttggctgtcagccatgagaagggcaagatcaccgttctgcagctctctgcactcctgaagcaagcagattccagcaaaaggaagttaactctgacccgcttggcttctgccccagttccttttactgtgttgagcctcacaggaaatccctgcaaggaagactacttggcggtttgtgggctaaaggactgtcatgtgctcacctttagtagctcaggctctgtttcggatcacttggttttgcaccctcagttggcaacggggaacttcatcatcaaagccgtgtggttacctggttcacagaccgagttagcaattgtcaccgcagactttgttaagatttatgacctgtgtgttgatgccttgagtccaaccttctattttctcctgccaagctcaaagataagagatgttaccttccttttcaatgaggagggaaagaacatcattgttataatgtcttcggctgggtacatctatactcagcttatggaagaggccagcagtgcccagcagggacccttctatgtcactaatgtgttggaaatcaatcatgaggacctgaaggacagtaacagccaggtggcgggcggtggtgtgtccgtgtactactcccacgtgttgcagatgttgttcttcagctattgtcaaggcaaatcattcgcagccaccatcagcaggacaaccctggaggtgttgcaactcttccccatcaacatcaaaagttccaatggtggcagtaagacttctcctgctctttgccagtggtctgaggtgatgaaccaccctggcttggtgtgctgtgtccagcaaactacaggggtgccgctggtagttatggtgaaaccagacacttttcttatccaggagattaagactcttcctgctaaagcgaagatccaagacatggttgctattaggcacacggcctgcaatgagcagcagcggacaacaatgattctgctgtgtgaggatggcagcctgcgcatttacatggccaacgtggagaacacctcctactggctgcagccatccctgcagcccagcagtgtcatcagcatcatgaagcctgttcgaaagcgcaaaacagctacaatcacaacccgcacgtctagccaggtgactttccccattgacttttttgaacacaaccagcagctgacagatgtggagtttggtggtaacgacctcctacaggtctataatgcacaacagataaaacaccggctgaattccactggcatgtatgtggccaacaccaagcccggaggcttcaccattgagattagtaacaacaatagcactatggtgatgacaggcatgcggatccagattgggactcaagcaatagaacgggccccgtcatatatcgagatcttcggcagaactatgcagctcaacctgagtcgctcacgctggtttgacttccccttcaccagagaagaagccctgcaggctgataagaagctgaacctcttcattggggcctcggtggatccagcaggtgtcaccatgatagatgctgtaaaaatttatggcaagactaaggagcagtttggctggcctgatgagcccccagaagaattcccttctgcctctgtcagcaacatctgcccttcaaatctgaaccagagcaacggcactggagatagcgactcagctgcccccactacgaccagtggaactgtcctggagaggctggttgtgagttctttagaagccctggaaagctgctttgccgttggcccaatcatcgagaaggcaagagagaaacaagaatgctgctcaggagctggccactttgctgttgtccctgccagcacctgccagtgtccagcagcagtccaagagccttctggccagcctgcacaccagccgctcggcctaccacagccacaaggatcaggccttgctgagcaaagctgtgcagtgtctcaacacatctagcaaagagggcaaggatttggaccctgaggtgttccagaggctagtgatcacagctcgctccattgccatcatgcgccccaacaaccttgtccactttacggagtcaaagctgccccagatggaaacagaaggaatggatgaagggaaggaaccgcagaagcagttggaaggagattgctgtagtttcatcacccagcttgtgaaccacttctggaaactccatgcatccaaacccaagaatgccttcttggcacctgcctgccttccaggactaactcatattgaagctactgtcaatgctctggtggacatcatccatggctactgtacctgtgagctggattgtattaacacagcatccaagatctacatgcagatgctcttgtgtcctgatcctgctgtgagcttctcttgtaaacaagctctaattcgagtcctaaggcccaggaacaaacggagacatgtgactttaccctcttcccctcgaagcaacactccaatgggagacaaggatgatgatgacgatgatgatgcagatgagaaaatgcagtcatcagggatcccgaatggtggtcacatccgtcaggaaagccaggaacagagtgaggtggaccatggagattttgagatggtgtctgagtcgatggtcctggagacagctgaaaatgtcaacaatggcaacccctctcccctggaggccctgctggcaggcgcagagggcttcccccccatgctggacatcccacctgatgcagatgacgagaccatggttgaactagccattgccctgagcctgcagcaggaccaacaaggcagcagcagcagtgccctgggcctgcagagcctgggactgtccggccaggcacccagctcttcctctctggacgcaggaaccctctctgacaccacagcatcagctccagcctcagacgacgagggcagtacagcagcgacagatggttctacccttcggacctctcctgctgaccacggtggtagtgtgggctcggagagcgggggcagtgcagtggactcagtggctggcgagcacagtgtatctggccggagcagtgcttatggcgatgctacagctgaggggcatccggctggaccaggaagtgtcagctcaagcactggagccatcagcaccaccactgggcaccaggagggagatggctccgagggagaaggagaaggagaaactgaaggagatgtccacactagcaacaggctgcacatggtccgtctaatgctgttggagagattactgcagaccctgcctcaattacgaaacgttggcggtgtccgggccatcccatacatgcaggtcattctaatgctcactacagatctggatggagaagatgagaaagacaagggggccctagacaacctgctctcccagcttattgctgagttgggtatggataaaaaggatgtctccaagaagaatgagcgcagcgccctgaatgaagtccatctggtagtaatgagactcctgagtgtcttcatgtcccgcaccaaatctggatccaagtcttccatatgtgagtcatcttccctcatctccagtgccacagcagcagctctactgagctctggggctgtggactactgcctgcacgtgctcaaatcactgctggaatattggaagagccaacagaatgacgaggagcctgtggctaccagccagttgctgaaaccacatactacctcctccccacctgacatgagcccattctttctccgccagtatgtgaagggtcatgctgctgatgtgtttgaggcctatactcagcttctaacagaaatggtactgaggcttccttaccaaatcaaaaagattactgacaccaattctcgaatcccacctcctgtctttgaccactcgtggttttactttctctccgagtacctcatgatccagcagactccatttgtgcgccgtcaagtccgcaaacttctgctcttcatctgtggatccaaagagaagtaccgccagctccgggatttgcacaccctggactctcacgtgcgtgggatcaagaagctgctagaagagcaggggatattcctccgggcaagtgtggttacagccagctcaggctccgccttgcaatatgacacactcatcagcctgatggagcacctgaaagcctgtgcagagattgccgcccagcgaaccatcaactggcagaaattctgcatcaaagatgactccgtcctgtacttcctcctccaagtcagtttccttgtggatgagggcgtgtccccagtgctgctgcaactgctctcctgtgctctgtgcggcagcaaggtgctcgctgcactggcagcctcttcgggatcctccagtgcttcttcctcctcagcccctgtggctgccagttctggacaagccacaacacagtccaagtcttccactaaaaagagcaagaaagaagaaaaagaaaaggagaaagatggtgagacctctggcagccaggaggaccagctgtgcacagctctggtgaaccagctgaacaaatttgccgataaggaaaccctgatccagttcctgcgttgtttcctgttagagtccaattcttcctcggtgcgctggcaggcccactgtctgacactgcacatctacagaaattccagcaaatctcaacaggagctcctgctagatctgatgtggtccatctggccagaactcccagcctatggtcgtaaggctgcccagtttgtggacctactaggatatttctccctgaaaactccacaaacagagaagaagttgaaggagtattcacagaaggctgtggagattctgcggactcaaaaccatattcttaccaaccaccccaactcgaacatttataacactttgtctggcttagtggagtttgatggctattacctggagagcgatccctgcctggtgtgtaataacccggaagtaccgttctgttatatcaagctgtcttccattaaagtggacacgcggtacaccaccacccagcaggttgtgaagctcattggcagtcacaccatcagcaaagtgacagtgaaaatcggggatctgaaacggaccaagatggtgcggaccatcaacctgtattataacaaccgaaccgtgcaggccatcgtggagttgaaaaacaagccagctcgctggcacaaagccaagaaggttcagctgacccctggacagacagaggtgaagattgacctgccgttgcccattgtggcctccaatctgatgattgagtttgcagacttctatgaaaactaccaggcctccacagagaccctgcagtgccctcgctgtagtgcctcggtccctgccaacccaggagtctgtggcaactgtggagagaatgtgtaccagtgtcacaaatgcagatccatcaactacgatgaaaaggatcccttcctctgcaatgcctgtggcttctgtaaatatgcccgcttcgacttcatgctctatgccaagccttgctgtgcagtggatcccattgagaatgaagaagaccggaagaaggctgtatccaacatcaatacacttttggacaaagctgatcgagtgtatcatcagctgatgggacaccggccacagctggagaacctgctctgcaaagtgaatgaggcagctccagaaaagccacaggatgactcaggaacagcagggggcatcagctccacttctgccagtgtgaatcgttacatcctgcagttggctcaggagtattgtggagactgcaagaactcttttgatgaactctccaaaatcatccagaaagtctttgcttcgcgcaaagagttgttggaatatgacctacagcagagggaagcagccactaaatcatcccggacctccgtgcagcccacattcactgccagccagtaccgtgccttatccgtcctgggctgtggccacacatcctccaccaagtgctatggctgcgcctcggctgtcacagaacattgtatcacactacttcgggccctggccaccaacccagccttgaggcacatccttgtctcccagggccttatccgggagctctttgattataatcttcgccgaggggctgcggccatgcgggaggaggtccgccagctcatgtgcctcctaactcgagacaacccagaagccacccaacagatgaatgacctgattattggcaaggtctccacagccctgaagggccactgggccaaccccgatctggcaagtagcctgcagtatgaaatgctgctgctgacggattctatctccaaggaggacagctgctgggagctccggttacgctgtgctctcagccttttcctcatggctgtgaacattaagactcctgtggtggttgaaaacattaccctcatgtgcctgaggatcttgcagaagctgataaaaccacctgctcccactagcaagaagaacaaggatgtccccgtcgaggccctcaccacggtgaagccatactgcaatgagatccatgcccaggctcaactgtggctcaagagagaccccaaggcatcctatgatgcctggaagaagtgtcttcctatcagagggatagatggcaatgggaaagcccccagcaaatcagagctccgccatctctatttgactgagaagtatgtgtggaggtggaaacagttcctgagtcgtcgggggaagaggacctcccccttggatctcaaactggggcataacaactggctgcgacaagtgcttttcactccagcaacgcaggccgcacggcaggcagcctgtaccattgtggaagctctagccaccattcccagccgcaagcagcaggtcctggacctgcttaccagttacctggatgagctgagcatagctggggagtgtgcagctgagtacctggctctctaccagaagctcatcacttctgcgcactggaaagtctacttggcagctcggggagtcctaccctatgtgggcaacctcatcaccaaggaaatagctcgtctgctggccctggaggaggctaccctgagtaccgatctgcagcagggttatgcccttaaaagtctcacaggccttctctcctcctttgttgaggtggaatccatcaaaagacattttaaaagtcgcttggtgggtactgtgctgaatggatacctgtgcttgcggaagctggtggtgcagaggaccaagctgatcgatgagacgcaggacatgctgctggagatgctggaggacatgaccacaggtacagaatcagaaaccaaggccttcatggctgtgtgcattgagacagccaagcgctacaatctggatgactaccggaccccggtgttcatcttcgagaggctctgcagcatcatttatcctgaggagaatgaagtcactgagttctttgtgaccctggagaaggatccccaacaagaagacttcttacagggcaggatgcctgggaacccgtatagcagcaatgagccaggcatcgggccgctgatgagggatataaagaacaagatttgccaggactgtgacttagtggccctcctggaagatgacagtggcatggagcttctagtgaacaataaaatcattagtttggaccttcctgtggctgaagtttacaagaaagtctggtgtaccacgaatgagggagagcccatgaggattgtttatcgtatgcgggggctgctgggcgatgccacagaggagttcattgagtccctggactctactacagatgaagaagaagatgaagaagaagtgtataaaatggctggtgtgatggcccagtgtgggggcctggaatgcatgcttaacagactcgcagggatcagagatttcaagcagggacgccaccttctaacagtgctactgaaattgttcagttactgcgtgaaggtgaaagtcaaccggcagcaactggtcaaactggaaatgaacaccttgaacgtcatgctggggaccctaaacctggcccttgtagctgaacaagaaagcaaggacagtgggggtgcagctgtggctgagcaggtgcttagcatcatggagatcattctagatgagtccaatgctgagcccctgagtgaggacaagggcaacctcctcctgacaggtgacaaggatcaactggtgatgctcttggaccagatcaacagcacctttgttcgctccaaccccagtgtgctccagggcctgcttcgcatcatcccgtacctttcctttggagaggtggagaaaatgcagatcttggtggagcgattcaaaccatactgcaactttgataaatatgatgaagatcacagtggtgatgataaagtcttcctggactgcttctgtaaaatagctgctggcatcaagaacaacagcaatgggcaccagctgaaggatctgattctccagaaggggatcacccagaatgcacttgactacatgaaaaagcacatccctagcgccaagaatttggatgccgacatctggaaaaagtttttgtctcgcccagccttgccatttatcctaaggctgcttcggggcctggccatccagcaccctggcacccaggttctgattggaactgattccatcccgaacctgcataagctggagcaggtgtccagtgatgagggcattgggaccttggcagagaacctgctggaagccctgcgggaacaccctgacgtaaacaagaagattgacgcagcccgcagggagacccgggcagagaagaagcgcatggccatggcaatgaggcagaaggccctgggcaccctgggcatgacgacaaatgaaaagggccaggtcgtgaccaagacagcactcctgaagcagatggaagagctgatcgaggagcctggcctcacgtgctgcatctgcagggagggatacaagttccagcccacaaaggtcctgggcatttataccttcacgaagcgggtagccttggaggagttggagaataagccccggaaacagcagggctacagcaccgtgtcccacttcaacattgtgcactacgactgccatctggctgccgtcaggttggctcgaggccgggaagagtgggagagtgccgccctgcagaatgccaacaccaagtgcaacgggctccttccggtctggggacctcatgtccctgaatcagcttttgccacttgcttggcaagacacaacacttacctccaggaatgtacaggccagcgggagcccacgtatcagctcaacatccacgacatcaaactgctcttcctgcgcttcgccatggagcagtcgttcagcgcagacactggcgggggcggccgggagagcaacatccacctgatcccgtacatcattcacactgtgctttacgtcctgaacacaacccgagcaacttcccgagaagagaagaacctccaaggctttctggaacagcccaaggagaagtgggtggagagtgcctttgaagtggacgggccctactatttcacagtcttggcccttcacatcctgccccctgagcagtggagagccacacgtgtggaaatcttgcggaggctgttggtgacctcgcaggctcgggcagtggctccaggtggagccaccaggctgacagataaggcagtgaaggactattccgcttaccgttcttcccttctcttttgggccctcgtcgatctcatttacaacatgtttaagaaggtgcctaccagtaacacagagggaggctggtcctgctctctcgctgagtacatccgccacaacgacatgcccatctacgaagctgccgacaaagccctgaaaaccttccaggaggagttcatgccagtggagaccttctcagagttcctcgatgtggccggtcttttatcagaaatcaccgatccagagagcttcctgaaggacctgttgaactcagtcccctgaccaccacacagcagctgcggcggcgaagacgaagctggcttgccttccaccctctgttctccctccttgtgcattaagttccctccgcgggatgctgcattgttaccccgccctcccctctctcatttttcttggtgtggcttggggtttttaggcttcctgttttatctcgtgtgtgtggtgcaccagctatgaggttgtctgtaacccaagccatcaaagggcctgtacatacctaggagccatgagttgtcccggccagcttcatacttgagtgtgcacatcttgagaaataaacaagtgacttaacacacattgaaaaggaa

SEQ ID NO: 460 - DNA, 986 bp, HOMO SAPIENS
gcaggcgcagacgcgcgggcgggaagatggcggctgggttcaaaaccgtggaacctctggagtattacaggagatttctgaaagagaactgccgtcctgatggaagagaacttggtgaattcagaaccacaactgtcaacatcggttcaattagtaccgcagatggttctgctttagtgaagttgggaaatactacagtaatctgtggagttaaagcagaatttgcagcaccatcaacagatgcccctgataaaggatacgttgttcctaatgtggatctaccacccctgtgttcatcgagattccggtctggacctcctggagaagaggcccaagtggctagccaattcattgcagatgtcattgaaaattcacagataattcagaaagaggacttatgcatttctccaggaaagcttgtctgggttctatactgtgatctcatttgcctcgactacgatggaaacattttggatgcctgcacatttgctttgctagcggctttaaaaaatgtacagttgcctgaagttactataaatgaagaaactgctttagcagaagttaatttaaagaagaaaagttatttgaatattagaactcatccagttgcaacttcctttgctgtgtttgatgacactttgcttatagttgaccctactggagaggaggaacatctggcaacaggaaccttaacaatagtaatggatgaggaaggcaaactctgttgtcttcacaaaccaggtggaagtgggctaactggagctaaacttcaggactgtatgagccgagcagttacaagacacaaagaagttaaaaaactgatggatgaagtaattaagagtatgaaacccaaataaacagccaccacattttcaaaacagatttgtaaaaattgtatttgttaacactgtgcacaaacgttttatactaaataaatatcaaactacattcttccgaaaaaaaaaaaaaaaaaaaaaaaaaaaaaa

SEQ ID NO: 461 - DNA, 7391 bp, HOMO SAPIENS
atgacctcacggacaaagcgaaggcagaaagttaaaatcagcatatcgaaaataaatcactctagttaccgaaaagaacataggccgttttgggagcaccagccacctccacaccagaactgggctgtcgggggccgctgcggcgcaggggctcgtccgggactgagtcagcgccggggccgagaagttcggcgggaggcgcagggcggggcttcctcccgccgactccgagcccggctctacttttctgagtccacgtctcttcctttggacaggcgtggcagcccgggcccgctcggcccagcccctcacggactgcggcgcgcggctccccggggcccggcccgccgaacgcctcgctctacagccctcacctcgcggcgccgagcgcagcgtccgcggcatggagaccggctccgactcaggtcagaggcccgcccccgggccgcgggggactggccctgcgcgcgcggcggcgcggttaggccgggccgcccgcacaggccgccgcgtgtcgagtccgcgcggggagcgcacgcggggcgggcggcgacagatcagcttgaacgggtctttttacgacttggccatgctgaaacagatgaacaattacagaatattatatctaaattccttcctcctgttttgctcaaactctctagcacccaagaaggagtacgtaaaaaggtaatggaactgctggtccatctgaataaacgtataaaaagccgccccaaaatacaacttccagtagagacactgttggttcagtaccaggaccctgctgcagtttcctttgtcacaaattttactataatttatgttaaaatgggctatcctcgcctaccagtggaaaaacaatgtgaactggcccctacgcttcttactgccatggaagggaagcctcagccacagcaggatagcttaatgcatcttttaataccaaccctttttcacatgaaataccctgttgaatcatcaaaatcagcttctccatttaatcttgctgagaaaccaaagactgtgcagctgcttttggacttcatgctagatgtccttctgatgccttatggttacgtgttaaatgaatcccagagtcgccaaaattcatcttcagcacagggttcttcttcaaacagtggcggaggttctggaatcccacagcctcctccgggaatgagcttttatgcagccaaacgagttattggtgataacccatggacacctgaacaattggaacagtgcaaattgggaatcgtgaaattcatagaagctgaacaggtgcctgaacttgaagctgttctccacttggtgattgcctctagtgatacacgccacagtgtggcaacggcagcagacctggaattgaaaagcaaacagagcttaattgactggaataatcctgccatcattaataagatgtacaaggtgtaccttggagatataccactgaagacaaaagagggtgcagttctgaagccagagttgaaaagggaccctgtcagtacaagagtcaagttaaagattgtcccccatctcctccgctctagacaagctgctgaaacgttcccagccaacattcaggtggtgtatgatggactttttggtacaaatacaaattcaaagttaagaacattatccctgcaatttgtgcatcatatttgtataacctgtccagaaatcaagattaagccattaggtccaatgcttttgaatggcctcaccaagctaatcaatgaatacaaagaggaccctaaactactgtcaatggcatattcagctgttggaaaactctccagtcggatgccacatttattcactaaggatatagcgcttgtgcagcagctttttgaagccctttgcaaggaagagcctgagactcgacttgctattcaagaagctttatctatgatggttggagcgtatagtactttggaaggggcacagcgaactctcatggaggcacttgtggcttcgtacttaataaagcctgaagttcaagttcgacaagtggctgtgaaatttgccagtacggtgtttccctcagatcatatcccttccagatatttgctgctactggctgcaggagatccacgtgaagaagttcatggagaagcacaacgcgtattaaggtgtcttccaggtagaaacagaaaagaaagtacttctgagcagatgccttccttcccagaaatggtttattacatccaagaaaaggcttctcatcgaatgaaaactccagtcaagtacatgaccgggaccactgtccttccatttaacccagcagcctttggagagatcgttctgtacttgcgcatgtgccttgcgcacagtgcgggggtggtgcccacctctcagagtttggctgatatgcaggatcatgccccagccattgggcgctacatacggactttaatgtcaagcgggcagatggcaccctcatcatctaacaagagtggggagactaaccctgtccagatctacattggcctgcttcagcagctgttagcaggtgttggaggtttgccggttatgtactgtctattggaagctgtgtcagtgtatccagaaaagctggctaccaaatttgtagacaaaacagaatggataaagagtctgatgaataacagtaaagaagaaatgcgcgaactggcagcgttgttttattctgtagtggtatcaacagtgtcggggaatgagttgaaatcaatgatagaacagcttataaagactacaaaagacaatcacagcccggagatacagcatggatccttgcttgcattgggattcacggtgggaaggtatttggctaaaaagaaaatgagaatgtcagagcaacaagacctggagagaaatgctgacaccctccctgatcaagaggaactcattcagagtgctacagaaacaataggctcatttttggacagtacatcacccctcctggcaattgctgcctgcacagccctgggtgaaattggcagaaatggtccacttccaatccccagtgagggatctggctttaccaaattgcatcttgtagaaagcttactaagtagaataccttccagtaaagaaacaaataagatgaaagaacgagcaatccaaacactgggatattttccagttggggatggagattttcctcaccagaaactcctcttgcaaggtctgatggattctgtggaggccaagcagatagaacttcagttcactattggcgaagccattaccagtgctgcaataggaactagttctgtggctgcccgagatgcctggcaaatgactgaagaggaatatactccacctgctggagccaaagtgaatgatgtggttccatgggtgttggatgtgattttaaataaacatatcatcagccccaacccacacgtgaggcaagcagcctgcatctggctcctttcccttgtcaggaagctaagtacccacaaagaagtgaagtctcatcttaaagaaattcaaagtgcatttgtttcagttctatcagaaaatgatgaacttagccaagatgttgcatcaaagggccttgggttggtttatgaactaggcaatgaacaagatcaacaggaattggtttctacacttgtggaaacacttatgactggcaaaagagttaaacatgaagtttctggagagacagtggtatttcaagggggagctcttggcaaaacaccagatggtcagggcctttctacttacaaggaactttgttctctggcaagtgatcttagccagccagatctggtgtataaatttatgaatttagccaaccatcatgcaatgtggaactctaggaagggtgctgcttttggttttaatgtaattgctaccagagctggagagcagctggctccttttctgcctcagctagttcctcgactttatcgttaccagtttgatcccaaccttggcattcgacaggccatgacaagtatttggaatgcgttggtcactgacaaatccatggtggataaatatttgaaagaaattcttcaagatttggttaagaaccttacaagcaatatgtggcgagttcgagaatccagctgtttagctttgaatgatttattgagaggaagacccttagatgacatcattgataaacttccagaaatttgggaaacgctttttagagtacaagatgatatcaaggaatctgtacgaaaagcggcagaactagctctgaaaactctgagcaaggtctgtgtgaaaatgtgtgaccctgccaaaggagcagctggccagagaaccatcgctgcccttctgccttgccttctggacaaaggaatgatgagcaccgtgacggaagttcgagccctcagcattaacacccttgtgaagatcagcaaaagtgcaggagccatgttgaaaccgcatgcaccaaaactcattccagctctgctagagtccttaagtgtattggagccccaagttctcaattatttgagcctccgggcgacagagcaagaaaaggctgcgatggatagtgctcggcttagtgctgccaaatcttctccaatgatggaaacaatcaacatgtgcctgcaataccttgatgtgtcagtgctgggcgagctagttcctaggttgtgtgaactgatcagaagtggtgtaggtcttggaactaagggtggctgtgccagtgtcattgtgtcattaactactcagtgtcctcaggacctaacaccttactcaggtaaacttatgagtgctttgctgagtggcctgacagatcggaacagtgtgattcagaaatcttgtgcatttgctatgggccatttagttcggacctcacgggatagcagcactgaaaaactcctgcagaagctcaatgggtggtatatggagaaagaagaacctatctacaagacctcttgtgctttgactattcatgctattggacgatacagccctgatgtattaaagaatcatgcaaaagaagtcctgcctctggcatttttaggcatgcatgaaattgctgatgaggagaaatccgaaaaagaagaatgtaatttatggaccgaagtgtggcaggaaaacgtacctggatcctttggtggcattcgattatacctgcaggagttaattactattacccagaaggctttgcagtctcagtcctggaaaatgaaagcccagggtgcaattgccatggcatcaattgcaaaacagactagctctctagtacctccatatctcggaatgatactgaccgcattgctgcaaggcctggctggaagaacgtgggcaggaaaggaggagctattgaaagccattgcctgtgtggtgacagcttgcagtgcagagctggaaaagtctgtgcccaatcaacccagcacaaatgaaattcttcaagctgttctgaaggaatgtagcaaagagaatgtcaaatacaagattgtagcaatcagctgtgcagctgatatcttgaaggccaccaaagaggacagattccaggagttctctaacattgtcatacctctcatcaagaagaactcacttgaaagcagtggggtccggacaaccaaaaatgaagaggagaatgaaaaggaaaaggagctccagctggaatatctgctgggtgcctttgaaagcctgggcaaagcctggccgcgaaacgcggagacccaacgttgttatcgtcaggagctgtgcaaactgatgtgtgaacggctaaaactcagcacgtggaaagtgcagctaggagtcctgcaatcaatgaatgccttttttcaggggttaatgcttttggaagaagaacatgccgatcctgaggctttggctgaaattctgcttgaaacttgtaaatcaatcacatattctttagaaaataagacctactcatctgtgagaacagaagctttatctgtgatagaattgctgcttaaaaaacttgaagaatctaaacagtgggaatgtttgacatctgaatgcagagtgctcctaattgagtctttagctactatggagccagacagcagacctgaactgcaggagaaagcagcgttactgaagaaaacacttgaaaatctggaataaattagaaggggaagaaacaaacaagtgccatgttcattgggggttgaagtggtggtgttctttgaaaaaccaagtgggaaaaagtaaagattaatctgtagcatgcatcattccttggctgaaataaaaagaaaaagccttaaattttgttccttattagctttattttactttatgtttttaaagtatctgggctgagtgagcttaatggaaccttggatgtttgaggggtggttgtaaaggaaactggcagaaatagttactaaaagagttcaagctgttattaaaggaattaatagacagagttgcagagcaagctggataaaaatcttagaactgcattcaaattagttatttcaggaaggggccctataaataacttattttaacctccctcttacacctgaagaaataggaagctgtgtcatctcagaggctttctgaggcctgtgccaaagtcagaacccaggtgtttaatgtctggccctggatactttcttttatggccatctgccaaatcagtgctaaccccggcttacccaagaaacttccaagatgaggtacgtttagggtggcacacagcagtctttgtgccagaactaaactgacccttaccattgggtttctgaaagccagaagctaaacattgtcttgtcatgtgtttaggtggttgatttggagaaaatgattgtttagcatctttacagatggagaggacagagtcagtctccttcggataattccaatcgtcttccttttacaggtggataaagtagattaggacaagatcacacattctatctgtgtctgtggctgcatattttgcaaaaccagaaacaaaatcgcagactgccgtggtttagaccatttataatgtcaaaactgtaatgacaaatttctgttcacttttatgctaccagtatgactttataggggagaaggaaagccttttaattagccacctgggaattactcttttaaaaaatgccttttctcaaaagaacatgataccactccaagtaaatcattgccactaggggttttcctccttccttctgttgcccatgcccctgcctgaaagtgtagggtaagaggaaaaacaagtaaaaccttagtgttgatggtaaactgagaactctgtagcttaccttggattccagagcagaagactggtttacattcagtactcatccttattgacgttaacaccaggaatctccatgtttattatttttcgtggaaactccatgtttattatttttggtggtctctattgaccaatgtatttcaaacttttttgactgcaagtcataataaaaataactttttacatcacg

SEQ ID NO: 462 - DNA, 3264 bp, HOMO SAPIENS
gggcgtcagcgagccgtgagatgcgtggtccaccatcggtgacctcaccgcctcggttcgccctcagccgccccgattggccatctgcaagcttcccttctccgtggagagcaggaagacagtcatgggacctcagggagccaggagacaggctttcttggcatttggggatgtcactgtggatttcacccagaaggaatggaggctgctgagccctgctcagagggccctgtacagggaggtgacactggagaactacagccacctggtctcactaggaattctccattctaaaccagaactcatcaggcggctagagcaaggggaagtgccctggggagaagagagaagacgccggccaggcccctgtgcaggaatatatgcagaacatgtcctgcggcccaagaatcttggacttgcacatcagaggcaacagcaactacaattttctgatcaaagcttccagagtgacacagctgaaggtcaagagaaagaaaaaagcactaagcccatggcattttccagcccacccctaagacatgcagtaagctcaaggaggaggaacagtgtagtggaaatagagtctagtcaaggccagagggaaaatcctacagaaatagacaaagtattgaaaggaatagaaaattcaagatggggagcattcaagtgtgcagagcgtgggcaagacttcagccggaagatgatggtaatcatacacaaaaaagcacattccaggcagaaactttttacatgcagggagtgtcaccagggctttagagatgagtcagcattgctcttgcaccagaacacacacacaggagagaagtcctatgtgtgcagtgtgtgtgggcgaggcttcagcctcaaggccaacctcctcagacaccagaggacacactcaggagagaagccttttctgtgcaaggtgtgtggacgaggctataccagtaagtcatacctcactgtgcatgagagaacacacacaggagagaagccttatgaatgccaggagtgtgggcgaaggtttaacgataagtcctcatacaacaagcacttgaaggcgcattcaggggagaagccttttgtgtgcaaggagtgtgggcgaggctatactaataagtcatacttcgttgtgcacaagagaatacactcaggagagaagccttacagatgccaggagtgtggccgaggctttagcaataagtcacaccttatcacacaccagaggacacactcaggggagaagccctttgcgtgcaggcagtgtaagcaaagttttagcgtgaaaggaagtctcctcagacaccagagaacacactcaggggagaagccttttgtgtgcaaggattgtgagcgaagctttagccaaaagtcaactcttgtctaccaccagagaacacactcaggggagaaaccttttgtttgtagagaatgtgggcaaggatttattcagaagtcaacccttgtgaaacatcagatcacacactcagaggagaagccttttgtgtgcaaggactgtggacgaggctttatccaaaagtcaaccttcactttacaccagaggacacactcagaggagaagccttatggatgtcgggagtgtgggcgaaggtttcgggataagtcctcctataacaagcacctgagggcacacttgggtgagaaacgttttttctgcagggattgtgggcgaggctttaccttgaagccaaatctcaccatacatcagaggacacactcaggagagaagcccttcatgtgcaagcagtgtgagaaaagttttagtttgaaggcaaatcttcttagacatcagtggacacactcgggggaaaggccatttaattgcaaggattgcgggcgaggcttcatcctaaaatcaactctcctcttccaccagaagacacactcaggggagaagcctttcatctgtagtgaatgtgggcaaggatttatctggaagtcaaatcttgtgaaacaccagcttgcacattctggcaagcagccttttgtatgcaaggagtgtgggcgaggcttcaactggaagggaaatctcctcacacaccagaggacacactcaggggagaagcccttcgtgtgtaatgtgtgtgggcaaggcttcagctggaagagaagtctcaccagacaccactggcggatacactcaaaggagaagccttttgtttgccaggagtgtaagcgaggctataccagtaagtcagacctcactgtgcatgaaagaatacacacaggagagaggccttatgaatgccaagagtgtggacgaaagtttagcaataagtcatactacagtaagcacttaaagagacacttacgtgagaagcgtttttgtacagggagtgtgggtgaggcttcatcttgaagttatatctcaccatccatcagaggacacactcaggagagtaactttgctttgttacaagctttagttgaggctgcataacttgttcgtgaagatataacagaggcagacagaatccagagggctacagagaacctgaattcaacccatgtgtccccaagagattcagagaaaagaggtcaatgtttagggaacagagatgccagttgaggggagggcattacctgggctattggggaaatgtggtctctttcctactgagcacatattcttgttgtatttgtgccaggctgtgctttctaaggactgctcttagccagtgactgcagagcagggataccaaggcaggcctgttacactctccccaacctccttggactgcaaacaatctaggacacctccaccaaacctcctcttgcactttccctctggcttccctcccagccttccttggtttggatgttttgtcccctccttaatttatgttgaaactctacataaactgtttactgttgaaacagtgtaagtattaggaggtgggacctttgggaagtgattaagtcaagtcacgaagatagagctttgcgaatgggatcaggtgcccttatgaaaaggcttgatagagggagtttgtcctgtggcccttctattttctgctctgtgaggacacaatgctcctcccttccaaaagatgcagcatgaaggcatcatcttggaaacagacatgagccctcaacagacaactgcacctactgatgttttgatgttgaacttcccagcctccagaactctgggaaaataaagtcctctttatacaaaaaaaaaaaaaaaaaaaaaaaaaaaaaaaaaaaaaaaaaaaaaaaaaaaaaaaaaaaaaaaaaaaa

SEQ ID NO: 463 - DNA, 3651 bp, HOMO SAPIENS
aagatggctgccctaatgtacacttgggaccttgcctggcgcctcttccgggcttggcagcgggcggggtccattgagtaaagccttgcgtgcctgcgcccgcgacggaggcgcgcttcaaagcgcaggcgcggggagggggtgggggaggagggaaagcggcgagtaagatggaagatgaggaggtcgctgagagctgggaagaggcggcagacagcggggaaatagacagacggttggaaaaaaaactgaagatcacacaaaaagagagcaggaaatccaaatctcctcccaaagtgcccattgtgattcaggacgatagccttcccgcggggccccctccacagatccgcatcctcaagaggcccaccagcaacggtgtggtcagcagccccaactccaccagcaggcccacccttccagtcaagtccctagcacagcgagaggccgagtacgccgaggcccggaagcggatcctgggcagcgccagccccgaggaggagcaggagaaacccatcctcgacaggccaaccaggatctcccaacccgaagacagcaggcagcccaataatgtgatcagacagcctttgggtcctgatgggtctcaaggcttcaaacagcgcagataaatgcaggcaagaaaagatgccgccgttgctgccgtcaccgcctcctgggtcgtccgccacgggttgcactgccgtggcagacagctggacttgagcagagggaacgacctgacttacttgcactgtgatcccccttgctccgcccactgtgaccttgaaccccatgcactgtgacctccccccttctcccccttcccactgtgattggcacatcgacaagggctgtcccaagtcaatggaaagggaaagggtgggggttaggggaaggttggggggacccagcaaggactcagagagtcagacagtgccacttggccacttggggtaaagccagtgccagcaataacagtttatcatgctcattaatttgggatttcaaaacacaaatgaaaactcacacccacccacccccaagtgcatgtctccatcacttaaaaagtaagttccatttgaaaatatcctttcttttttttttcttcctatttttgtttgtttatacaaatatctgatttgcaagaaaaagtgcatgggaggggttttagtggtttaatgaatttttaattaagaaagggtagtttggtagtctacttaaaaatgtttctgggaaattcactagaaacattaaccaataggattttggtgagcttagcttctgtattcctactgccgcccagaaaaggggcagggctctgcagccgccaggacagacgagcaccccatgcctatacctccctccccgagctaagtcccagggcatctgggccttgcctggagactgggctagctctgtaggctcggagagcctggggagggtgccaaccccacctctagtattttgggagatagggaaagtgaaccgacttccccttcccatacccctcagggtggttccctaccagccaggcttactacttctagaagaaagcagagtgccagggagtgagattgcatccctgggcttagaagtgacggagagaagacttgtttagtattttgccatcagcacaaggaaaaccaggagagagtctgcctccaggactctgagccttctgcctcgtatgttcagaaggtggataggtcttcccactccagcatggcttgaactcttaggggtctgcagtgctccatctccattggtggccccagctcagtaactatacctggtacatttcctgtgtgcaatcagtaccttgaaggcagaacattctgaataaagttggaaaaagaacagctttgctttgcaaagattgatgacagactggttcctcagaggcctaggctacccgtcacccctttttccagagcgagggcctggaatgaaggcagtttatcctctgtccctggagcctggggtttgctttggctccttgaggtggaagagactaagagggcagctgcccagagcagctgtgtgtacctggctcctctcaggcttcctgatcccttccgttgcactgcgccttatccctcagccagccagacagcctccctgctcctgaccagcagatacgtttcggagtggttggtgtggtttttgtgatgagggcagcacgtggtggccaaggtggcaagctgagtctcacaggctcactccctcgttggttccctgtgggaatggtaggccaggcccagtaagccatgccccaacacgtcctctcctccggaggaagggccagctgccagctgagtcagcagctagtccatagcacagccttataactgtaaagccaggcattgcccatgagcagagctggaaccagagcttcagtcagtaagagggaggattaccttcaggagaaggcaaggaagaaaactggctgctatctttatagttccactgccctaaccaagtgtccacattctaaatgtgtagtgtccatcccttatgtaatagtggtttcccgcccaaagtgagactttccttttaattggagaagggtatagaggtagtccaggtgggaacgccagaagtgctgattgcccagccattgggaccacctgttcttgccccactaccctctagtgggaggccaaagtaaaggctggctggtgggtgtctgtggattgaggatgtggcagggactggtcctcccacctccctctggccaaagatgggctttgcccgctgtgtgcctgtcaccacccaccagcagtcatgccctgggcttcccaaatggagaggtagcaggcaacgtttttaaaaagaaagaaaacaggaaactgtattgtgtcgggggaggcgggagggagatgaggaaacggtttggattttgtgtgtgggagggtattttttgggggtagttgtctgtaactttcctaagtgctttttttccttttcttttttaaagtaagttgcaggctttggcttggaaaaccccagggggatggggggcagaaacctgaggctgctgcccctttatctgccttcacggtactgtccccttcccccagctcctccctgaccccatgggccaggcctcagaccttccagctaaccgcttcccatgagccactactctgatgtcagcctataaccaaaggagctggggggtccaggcctggtgaccaacctttctcagcccactcaatcagggtgctccccacctgcaggcaggaggcaacaccctatctgctaccatcagccccttccagagcccatctgccccgcccagccctgccctgcccagccataccctgctctgccccatctgggggtgccctgctcagggatgggctggcagggctgtacccagcctccctggtaagcagagactcaagaaacctctggggtcctgttttctggtcgtgtgatcccaggggtgcacatgggccccttgggtgtctgaacagaagggcatgggagggagggctgcacccctgcagtcttactctgctggtgtagcgggcagctgcccactcccaccccaccctgcaccgcgggctcctgagtcggcagattaagcattttataaattgtattttaaatacatgttttaaacttgtcaaaaaaaaaaaaaaaaaa

SEQ ID NO: 464 - DNA, 1519 bp, HOMO SAPIENS
gctgggtgcgtgcgcggcgactgcgacgggcagtggcagtcatggcggctcagtgcgtgaggttggcgcggcgcagtcttcctgctttggcgttgtctctcaggccatctccccggttgttgtgcacagccacgaaacaaaagaacagtggccagaacctggaagaggacatgggtcagagtgaacagaaggcagatcctcctgctacagagaagaccctcctggaagagaaggtcaagttggaggaacagctgaaggagactgtggaaaaatataaacgagctttggcagacactgagaacttacggcagaggagccagaaattggtggaggaggcaaaattatacggcattcaagccttctgcaaggacttgttggaggtggcagacgttctggagaaggcaacacagtgtgttccaaaagaagaaattaaagacgataaccctcacctgaagaacctctatgaggggctggtcatgactgaagtccagatccagaaggtgttcacaaagcatggcttgctcaagttgaaccctgtcggagccaagttcgacccttatgaacatgaggccttgttccacacaccggttgaggggaaggagccaggcacagtggccctagttagcaaagtggggtacaagctgcatgggcgcactctgagacccgccctggtgggggtggtgaaggaagcttagctgctgttgatggggtgggtgtttttaaactcacttgatgtaactctcaaggctggttcattgtttctcatctatgagtacgtgtgaccttttcccaaaccttattggaaaccttaagtaaccagtggctaaacagaaaagccggttgcccaactgcattaatgaactctaattcgggagtctgttcccttttagtgccacgcgttgaatagttccacatactttcagaagagctcagcagggccctgcctggtctcccgagcatcatgagtaacgtgtctgctcagactctgctgacaccaaagtattttaaacaaataaaaggtcttggggaattctgtttggctacctgggcacgccagtctgcaccatgtgtccctgcggcgcatgagtgactggcgtatttagcccgtcacatttcattcgctgaaggaaaggcaagagagttgaaacatttttcttacttaaaaaaaatgatctttgtgaagaacatagtgagttcgtttgtcttcagtcaacagcggctgaaactgaccactgagaaatgggtgtgggcactgacagttctcccccattatttggccaggaattgagcttggcttggcaaagttccttttaccctgttctgttcatctaaatgcagacatatttaaatcatattcaactagttactaatgacctcaagttgtattccctggcaaaatggactttctcaaaataggactgcacgcttggtgtactttaaatgttaatgtttaatttaaaatttttatttaagaggattaaagccctaatgtttattttcctacaaaaaaaaaaaaaaa

SEQ ID NO: 465 - DNA, 1812 bp, HOMO SAPIENS
gcggaggggcgggccctggccgggtggtcccgggcggatcccgggaaggcggaaggcttcggcagagctgcgccgccgaggctgagcggtcccttctcgctgcggccgcccaggtgcccgcgcccgtggcgctatggaggcggcgctgctggggctgtgtaactggagcacgctgggcgtgtgcgccgcgctgaagctgccgcagatctccgctgtgctagcggcgcgcagcgcgcggggcctcagccttccgagtttacttctggagctggcaggattcctggtgtttctgcggtaccagtgttactatgggtatccgccgctgacctacctggagtaccccatcctcatcgcgcaagatgtcatcctcctgctctgtatctttcattttaacgggaacgtgaagcaggccactccttacatcgctgtattggtgtcttcttggttcatccttgccctgcagaagtggatcatagacctggccatgaatctatgtactttcatcagcgcggccagtaagtttgcacagctccagtgtctgtggaagacgagagactcaggaactgtgagtgcgctgacttggagcctctcttcctatacctgtgcaacaagaataatcacaaccttaatgaccaccaatgattttacaattcttctacgttttgtgatcatgctggctttaaatatatgggtaacagtgacagtacttcgctaccggaagaccgctataaaggctgaatgatggatacattattccttcacacagtggattttgagtaactgaaccaaaggaaaaagaagctctttgctaaattaaggtcttttataaatttagtaaatcagtttataatctttaaagccaaaggtttttttagacttgaaagaaagagccacttaaattcttgtttaaaaataccaatttgcctcctccttcctcacttcgttaggttatggtagtgctcagacatctgcagtgttgaggccagtcactgttggaagtcatccaagaagcccattttgaggccattttgagccttactcttaagttctctatgaagaactacattgatttgttggctttcagaatcttttaggaaataaatcctctccaggacaaaaatgaacatgaatggagtggcattttgttccaagtcagaggtgggcacctataataaatgactagggttcactttctgggactgatgtttaattgtaacacagatacaacagggtggccttgttgtgtataatacggtattatacccgcatgtgctctagcaaggataccaaggcaagcatacatgtagctggcttgagtttgtaccaaaacagtccttcaactttgcactgtgccttaagtaattactaacaaaaggtactaggattagctgcaatctctactttcgatgaggaaatcccagtaagctttctgattcaagtacaatgctgccattttttaaagggccacaactatagaattaccactgttggaatttggtacaaaatatgttttgtctattgaaaacatacacggtaaatggtgttgttaggtaggttctgtccagttcttagggacttttttcacattatagcatttttaccctaaacatgatgttgagattattatatactgtattttcttctaaattaaccctaatgtttaaaaactcactttccccctttaattgaaggcattgttttgttagatgcagtaatgatgtttaccagagattattgtttcctatgcaaaataaattttcatattttgaattctgctgagtcttaaaaaaaaaaaaaaaaaaaaaaaaaaaa

SEQ ID NO: 466 - DNA, 2342 bp, HOMO SAPIENS
cttgggcaggagggaccttcgatcctcggggagcccaggagaccagaacatgaactccttcaattataccacccctgattatgggcactatgatgacaaggataccctggacctcaacacccctgtggataaaacttctaacacgctgcgtgttccagacatcctggccttggtcatctttgcagtcgtcttcctggtgggagtgctgggcaatgccctggtggtctgggtgacggcattcgaggccaagcggaccatcaatgccatctggttcctcaacttggcggtagccgacttcctctcctgcctggcgctgcccatcttgttcacgtccattgtacagcatcaccactggccctttggcggggccgcctgcagcatcctgccctccctcatcctgctcaacatgtacgccagcatcctgctcctggccaccatcagcgccgaccgctttctgctggtgtttaaacccatctggtgccagaacttccgaggggccggcttggcctggatcgcctgtgccgtggcttggggtttagccctgctgctgaccataccctccttcctgtaccgggtggtccgggaggagtactttccaccaaaggtgttgtgtggcgtggactacagccacgacaaacggcgggagcgagccgtggccatcgtccggctggtcctgggcttcctgtggcctctactcacgctcacgatttgttacactttcatcctgctccggacgtggagccgcagggccacgcggtccaccaagacactcaaggtggtggtggcagtggtggccagtttctttatcttctggttgccctaccaggtgacggggataatgatgtccttcctggagccatcgtcacccaccttcctgctgctgaataagctggactccctgtgtgtctcctttgcctacatcaactgctgcatcaaccccatcatctacgtggtggccggccagggcttccagggccgactgcggaaatccctccccagcctcctccggaacgtgttgactgaagagtccgtggttagggagagcaagtcattcacgcgctccacagtggacactatggcccagaagacccaggcagtgtaggcgacagcctcatgggccactgtggcccgatgtccccttccttcccggccattctccctcttgttttcacttcacttttcgtgggatggtgttaccttagctaactaactctcctccatgttgcctgtctttcccagacttgtccctccttttccagcgggactcttctcatccttcctcatttgcaaggtgaacacttccttctagggagcaccctcccaccccccaccccccccacacacaccatctttccatcccaggcttttgaaaaacaaacagaaacccgtgtatctgggatatttccatatggcaataggtgtgaacagggaactcagaatacagacaagtagaaagattctcgcttaaaaaaaatgtatttattttatggcaagttggaaaatatgtaactggaatctcaaaagttctttgggacaaaacagaagtccatggagttatctaagctcttgtaagtgagttaatttaaaaaagaaaattaggctgagagcagtggctcacgcctgtaatcccagaactttgggaggctaaggtgggtggatcacctgaggtcaagagttccagaccaggctggccagcatggtgaaaccccgtctgtactaaaaatacaaaaaattaactgggcatggtagtgggtgcctgtaatcccagctacttgggaggctgaggtgggagaattgctcgaacttggaggtggaggttgtggtgagccatgatcgcaccactgcactctagcctgggtgaccgagggaggctctgtctcaaaagcaaagcaaaaacaaaaacaaaaacacctaaaaaacctgcagttttgtttgtactttgtttttaaattatgctttctattttgagatcattgcaaactcaacacaattgtaagtaatgatacagagggatcttgtgtacccttcacccagcctcccccaatggcaacatcttgcaaaactacaatgtagtctcataaccaggatattgacattgatacagtgaagatacaggacattctcatcaccacagggatccccaggatgcccacttccctccacccccacaccccagccgtgtccctaacccctggcaaccaggaatccactctccatttctataatgttgtcatttcaagaatgttattcaatggaatcatatagtatgtaacctgttttgagcttaaaaaaaaagtatacatgactttaatgaggaaaataaaaatgaatattgaaatgtt

SEQ ID NO: 467 - DNA, 2364 bp, HOMO SAPIENS
gcgcgctggcccggcacggcggtggtcttgcgggaggcgtgggctgggattgcggtgcctgtgcttcccggtgccagggtgtcatggaagggctgctgacaagatgcagagcattgcccgccctggccacctgcagccgccagctctctgggtatgttccttgcaggtttcaccactgtgccccaagaagagggcggcgcctgctgctgtctcgtgtgttccagccacagaaccttcgggaagaccgggtgctctccctgcaggacaaatctgatgacctgacctgtaagagccagcggctgatgctgcaggtgggcctgatctacccagcaagccccggctgttaccacctcctgccatataccgtccgtgccatggagaagctcgtgcgagtgatagaccaggagatgcaggccatcgggggccagaaagtcaacatgcccagcctcagcccggcagagctctggcaagccaccaaccggtgggacttgatgggcaaagagctgctaagacttagagacaggcatggcaaggaatactgcttaggaccaactcacgaggaagccattacggccttaattgcctcccagaagaaactgtcctacaagcagcttcccttcctgctgtaccaagtgacaaggaagtttcgggatgagcccaggccccgctttggtcttctccgtggccgagagttttacatgaaggatatgtacacctttgactcctccccagaggctgcccagcagacctacagcctggtgtgtgatgcctactgcagcctgttcaacaagctagggctgccatttgtcaaggtccaggccgatgtgggcaccatcgggggcacagtgtctcatgagttccagctcccagtggatattggagaggaccggcttgccatctgtccccgctgcagcttctcagccaacatggagacactagacttgtcacaaatgaactgccctgcttgccagggcccattgactaaaaccaaaggcattgaggtggggcacacattttacctgggtaccaagtactcatccattttcaatgcccagtttaccaatgtctgtggcaaaccaaccctggctgaaatggggtgctatggcttgggtgtgacacggatcttggctgctgccattgaagtcctctctacagaagactgtgtccgctggcccagcctactggccccttaccaagcctgcctcatcccccctaagaagggcagtaaggagcaggcggcctccgagctcatagggcagctgtacgaccacatcacagaggcagtgcctcagcttcacggggaggtgctcctggacgacaggacccatctgaccatcggaaacagactgaaagatgccaacaagtttggctacccctttgtgataatcgctggcaagagggccctggaggaccctgcacattttgaggtttggtgtcagaacactggtgaggtggccttcctcaccaaagatggagtcatggatttactgaccccagtgcagactgtctaaatgcccccagcccacccctgcccccatttgcagccttggtgttcgttctaacactgcattttcctacacccctttcctggactgctctctccagaaacagcacagctcatggagggtgagatcatgttagggaaatcaatttttatctagtcatttgttcagattatttgtatttaaagtcattaacttgatccctttctccagactggccatgccgccatatacctttccttttgtattccattgtggaagcttctaggaggctgagaagcaggagatccaagctccagtcctgggtgttaccctgaggggggaagtcacttcccttctctcagctgagtttttcacgtgtaagatgagaatggctgatggctgagagcccaccaaccttccccaccccgtatcagtttgaccacgggccttttgctacattctatccagagagcaggcctgccagcccctctccactgagaagttgggctgagagtatggggaaaagaatcaagagacctgactgccgccaactcactagtgacttagatacatcccctccccctgctggggcctcagtttccccatctgtaacttgagaaaatagaactagatctgtaaagtctggaactagatctgtaacgtccttataggtgtcactagggggttccatgagaggtgtgtgacaggcagtctgattcctctcattctccatagtctgtttcctggaaagtcgatgtaattaactgatggcccaaaaactacctcaagagacctggccctgttaagacggcttaaccactgagatcccgttctattgatttaataaagtcaaactattggaaaaaaaaaaaaaaaaaaa

SEQ ID NO: 468 - DNA, 1902 bp, HOMO SAPIENS
ctggcgcgcgcggccctgcgggtgacaggcaggcgggaaggggcggggcctcgggcggggccgccgtggggaggagggcggtgggaggggaggagtggagatggcggcggcggcggctcaggggggcgggggcggggagccccgtagaaccgagggggtcggcccgggggtcccgggggaggtggagatggtgaaggggcagccgttcgacgtgggcccgcgctacacgcagttgcagtacatcggcgagggcgcgtacggcatggtcagctcggcctatgaccacgtgcgcaagactcgcgtggccatcaagaagatcagccccttcgaacatcagacctactgccagcgcacgctccgggagatccagatcctgctgcgcttccgccatgagaatgtcatcggcatccgagacattctgcgggcgtccaccctggaagccatgagagatgtctacattgtgcaggacctgatggagactgacctgtacaagttgctgaaaagccagcagctgagcaatgaccatatctgctacttcctctaccagatcctgcggggcctcaagtacatccactccgccaacgtgctccaccgagatctaaagccctccaacctgctcatcaacaccacctgcgaccttaagatttgtgatttcggcctggcccggattgccgatcctgagcatgaccacaccggcttcctgacggagtatgtggctacgcgctggtaccgggccccagagatcatgctgaactccaagggctataccaagtccatcgacatctggtctgtgggctgcattctggctgagatgctctctaaccggcccatcttccctggcaagcactacctggatcagctcaaccacattctgggcatcctgggctccccatcccaggaggacctgaattgtatcatcaacatgaaggcccgaaactacctacagtctctgccctccaagaccaaggtggcttgggccaagcttttccccaagtcagactccaaagcccttgacctgctggaccggatgttaacctttaaccccaataaacggatcacagtggaggaagcgctggctcacccctacctggagcagtactatgacccgacggatgagccagtggccgaggagcccttcaccttcgccatggagctggatgacctacctaaggagcggctgaaggagctcatcttccaggagacagcacgcttccagcccggagtgctggaggccccctagcccagacagacatctctgcaccctggggcctggacctgcctcctgcctgcccctctcccgccagactgttagaaaatggacactgtgcccagcccggaccttggcagcccaggccggggtggagcatgggcctggccacctctctcctttgctgaggcctccagcttcaggcaggccaaggccttctcctccccacccgccctccccacggggcctcgggacctcaggtggccccagttcaatctcccgctgctgctgctgcgcccttaccttccccagcgtcccagtctctggcagttctggaatggaagggttctggctgccccaacctgctgaagggcagaggtggagggtggggggcgctgagtagggactcagggccatgcctgcccccctcatctcattcaaaccccaccctagtttccctgaaggaacattccttagtctcaagggctagcatccctgaggagccaggccgggccgaatcccctccctgtcaaagctgtcacttcgcgtgccctcgctgcttctgtgtgtggtgagcagaagtggagctggggggcgtggagagcccggcgcccctgccacctccctgacccgtctaatatataaatatagagatgtgtctatggctgaaaaaaaaaaaaaaaaaaaaaaaaaaa

SEQ ID NO: 469 - DNA, 2387 bp, HOMO SAPIENS
cggggctcgtggcgtcgggcctggcgggctccccgttgggcgggggcggcggtccgagcggctgcggcagcggaagcgggtccgggtcgcgcagggcgggggcggcgcagcgggcggaggcggccgtgggccgcctgggcagaatgtcacgatggacgagggcggcacgcccctgctccccgacagcctggtctaccagatcttcctgagcctgggcccggccgacgtgctggccgccgggctggtgtgccgccaatggcaggccgtgtcgcgggacgagttcctgtggagggagcagttctaccgctactaccaggtggcccgcgacgtgccccgacacccagcggccatgtcctggtacgaggagttccagcggctgtatgacacggtgccctgcgtggaggtgcagacgctgcgggaacacacagaccaggtcctgcacctcagcttctcccattccgggtaccagttcgcgtcctgctccaaggactgcactgtgaagatctggagcaacgacctgaccatctcgctgctgcacagcgcggacatgcggccctacaactggagctacacccagttctcccagttcaacaaggacgactcgctactgctggcctcgggggtgttcctggggccgcacaactcctcatccggcgagattgctgtcatcagcctagactccttcgcgctgctgtcccgcgtgcggaacaagccctatgacgtgtttggctgttggctcaccgagaccagcctcatctcggggaacctgcaccgcatcggagatatcacctcctgctcggtgctgtggctcaacaatgccttccaggatgtggagtcagagaacgtcaacgtggtgaagcggctgttcaagatccagaacctcaatgccagcaccgtccgcacggtgatggtggccgactgcagccgcttcgacagccctgacctgctgctggaagccggtgacccggccacgtccccctgccgcatctttgacctgggcagcgacaacgaggaggtggtggctggcccggcccccgcccacgccaaggagggcttgcggcactttctggaccgcgtgctggaggggcgggcgcagccacagctgtcggagcgcatgctagagaccaaggtggccgagctgctggcccagggccacaccaagccacccgagcgcagtgccacaggcgccaagagcaagtacctcatcttcaccactggctgcctcacctactccccacaccagatcggcatcaagcagatcctgccacaccagatgaccacggcagggcccgtgctgggtgagggccggggctccgatgccttcttcgacgcgctggaccacgtcatagacatacacggacacatcatcggcatgggcctgtcgcccgacaacaggtacctgtacgtgaacagccgcgcctggcccaacggtgcggtggtggccgaccccatgcagccgccaccaatcgcggaggagattgacctgctggtgttcgacctcaagaccatgcgggaggtgaggcgggctctgcgtgcgcaccgcgcctacacgcccaacgacgagtgcttcttcatcttcctggacgtcagcagggacttcgtggccagcggggcggaggaccggcacggctacatctgggaccgccactacaacatctgtctggccaggctgcggcacgaggatgtggtcaactcagtggtcttcagtccccaggagcaggagctgctgctcacggccagcgacgacgccaccatcaaagcctggcgctccccacgcaccatgcgcgtcctccaggcacctcgcccacggcctcgcaccttcttctcctggcttgccagccagaggcgctgaggtgtgctgggtgcactggagccaccgggaccccttgaggacatcgccaggctctgtggctttttcccgagcgggagaggtggagatgcttatagcagttacgccttaggaaggggacaaccaggccccgccacacgctcacacacaaacctgctcacgcagctgtgatgcttggcacggggtggccagtgcagatggagcccaaggccccctcggcctcctgggcaacttggggtacacaggatactgggggtgccgctcctcactcaaccccaggctaggggtacacctgacccagctggcctcggcccggggcaccttcggctggtcctgtggggccctggacggtggcccagtggtggcaggggctgctcctggctgtggttgtgcgcccggggcttgggagcggccggtcacgctgctgtgggcccgagtgtgttgcatgtccacgcaccacccgttcagggccctgaataaacagttggcaacagcaaaaaaaaaaaaaaaaaaaaaaaaaaaaaaaaaaaaaaaaaaa

SEQ ID NO: 470 - DNA, 3193 bp, HOMO SAPIENS
gccgcgtccggcccggtcctgtcccgcagcgtcccgccagccagctccttgcacccttcgcggccgaggcgctccctggtgctccccgcgcagccatggctcagcacttctccctggccgcctgcgacgtggtcggattcgacctggaccacactctgtgtcgctacaacctgcccgagagcgccccgctcatttataatagctttgcccagttcctagttaaggagaaagggtacgataaggaattgctcaatgtgaccccagaggattgggatttctgttgcaaaggtttggcattggatctagaagatgggaacttccttaaacttgcaaataatggcactgttctcagggcaagccatggcaccaagatgatgactccagaggtgctggcagaggcatatggcaagaaagagtggaagcacttcttgtcggacactggaatggcttgccgctcaggaaagtattacttttacgacaactactttgacctgccaggagctcttctgtgtgccagggtggtggactatttaacaaaactgaacaatggtcaaaaaacatttgatttttggaaggatatagttgctgctatacaacacaattataaaatgtcagcttttaaggaaaactgtggaatatattttccagaaataaaaagagatccaggcagatatttacatagttgtcctgaatctgtgaaaaaatggcttcgacagctaaagaatgctgggaaaattcttctgttaattaccagttctcacagtgattactgtagacttctctgcgaatatattcttgggaatgattttacagacctttttgacattgtgattacaaatgcattgaagcctggtttcttctcccacttaccaagtcagagacctttccggacactcgagaatgatgaggagcaggaggcactgccatctctggataaacctggctggtactcccaagggaacgctgtccacctctatgaacttctgaagaaaatgactggcaaacctgaacccaaggttgtttattttggtgacagcatgcattcagatattttcccagctcgtcactatagtaattgggagacagtcctcatcctggaagaactcagaggggatgaaggcacgaggagtcagaggcctgaggagtcagagcctctagagaagaaaggaaaatatgagggaccaaaagcaaaacctttaaatacttcatctaaaaaatggggctctttttttattgattcagttttgggactggaaaatacagaagactccttggtttatacatggtcttgtaagagaatcagtacttacagcactattgcaattccaagtattgaagcaatcgcagaattacctctggactacaaatttacaagattctcttcaagcaattcaaaaacagctggctactatccaaatcctccactggtcttatcaagtgatgagacactgatatccaaataagttgtctttactgaaaaatgaagtgaagacccatatatgcagttaaaaaaaagttaattttcaaaaaatactgtaaaagactttaaggaacaagttttattgaccaataagttgatatttgtccataggtctcctttctataaatcatcttgatgtttaacaactcttattatattaaaatctcagtatcctaaaacttagaaccttattgatattttctatacagtagttttgtgattagaattcacctggggacacacactcacacgcacagtcactcttacacatatgcctagtccagtggttctcaaagtgtgatccatagactaatagcatagcattacctgagaacttgataatgcatatttgcaggccccacgcaaaacctgctgaatcagaagctctgagagtaaggcctaccaatctggtttaacaagcccgtcaggtgattctgatttacagtacagtttgagacccactggctagaacatatcctccagagacttggcttaattggtctgggtaaatatggctgagcgttgttatcttttgttatcttttatatgccctaggaaagtacaaccagaattgaaaaccaactgatctataccagttctttcaattaatagtcaagaacattgagtccagtgagattaagtgatttttgcaggctatgaggttttatgctattcctgtgttctccaaaacaagaaaataaaaagacatgacttattctctgttcatacagcaagtatggaaaaaagatgatctagaagtcaactatctcaacctccattgttacccactaggtttttttctaataatgttaaaggctatttaatttatttaatcaactttaagcattacattctcaattggggacaaaaattggttcttggggtgaaaaaatattagatatggcttgtggacttccaatatcatcctatccaacaaaatcttattccttagtattaatttatctcattgggaagaaatttgtagttaaaactatttaatgtaatttgaatttaatttctgtaattgggaaggagggtaataatgaacaaaaagtttgagaaaaaaatgctttaatgggttttacaggcatgctacaatccaggactgtggtgttctatgtgccgtgtatggtcatattagtagctatttgttgcaagatacttgaagccaaatgtttgcagtataggttcctggctactgtttatgctgtgatttcactctgtctatcatgggcagtattagaaaacacactggttttcactatctggtttacaaacactatcattattttacctggattgaagtgcagaatttggcatatcgatgcatgcaatggaaagaaaaaaaatttgttaaaatttgtaaatgttcagctaaatctcagatatactgtgggatgagtatctcagggtaagtaacaaaaaaacaaacaaaaaaaatcactgaaatttttccctcacagtcagtagctttgtttgatatttaacaataagtatatggtgatatacttgaaatttatgtccagaatgtcactggaatattacaatgagcataaataatcaagcttaggactaaatgaaagatactatctcatgtatgctttaaatagagaatttatttcttttaaaaataaagctatttttccttaaaaaaaaaaaaaaaaaaaaaaaaaaaaaaaaaaaaaaaaaaaaaaaaaaaaaaaaaaaaaaaaa

SEQ ID NO: 471 - DNA, 10542 bp, HOMO SAPIENS
ccgctggttccgtaacaacatcccgttggcttccctcaggcggcgggaccagtgcagccgccgcctcccaggatcgtccgccggtcagggcccttgccctccccggcacaggccaccatggccaccaacccacagccgcagccgcctcctccggcgccgccgcctcccccgccgcagccgcagccgcagccaccgccgccgccgccgggccccggggctggccccggcgcgggcggggcgggcggcgcgggtgcgggcgccggggacccgcagctcgtggccatgatcgtgaaccacctcaagagccaggggctcttcgaccagttccgcagagactgcctggccgacgtggacaccaagcctgcgtatcagaatctgagacagcgtgttgacaactttgttgcaaatcacttggcaactcacacatggagtccgcatctcaataagaaccagctaagaaacaacattagacaacaagtcctcaaatcaggaatgttggagtctggtattgaccgaattatttctcaggttgtggacccaaagatcaaccacacattcagacctcaggtagagaaagctgtgcatgagtttttggccacgctaaatcacaaagaggaaggaagtggcaacacagctcccgatgatgagaaaccagacacttcccttattacacaaggtgttcctactcctgggcccagtgctaatgtagccaatgatgccatgtcgatattggaaaccataacttctcttaaccaagaagccagtgctgctagggcttcaacagaaacatcaaatgccaagaccagtgagagagcgtcaaaaaaacttccatctcagccaaccactgatactagtactgacaaagaaagaacttcagaggacatggctgataaagaaaaatctacagctgactctggaggtgaaggactggaaacagccccaaagtctgaagagttcagcgacctcccctgtccagtcgaagaaattaaaaattacacaaaagagcataataatttaattctgctaaataaggatgttcaacaggaaagcagtgagcaaaaaaataaatcaacagacaaaggtgaaaagaagccagacagcaatgagaaaggagaaagaaagaaagaaaagaaggaaaagactgaaaagaaatttgatcactcaaaaaagagtgaagatacacagaaagttaaagatgaaaaacaagcaaaggaaaaagaagtagagagtttaaaacttccttcagaaaagaacagtaataaagctaaaactgttgaagggacaaaagaagatttctctttgatagattctgatgtggatggacttacagacatcacagttagctctgttcataccagtgacctttcatcttttgaagaagatactgaggaggaagttgtaacgtctgatagcatggaagaaggagagattacgtcagatgatgaagagaagaacaaacagaataaaacaaaaactcaaactagtgattctagtgaaggaaaaacaaaaagtgtacggcatgcgtatgtccacaaaccatatctttactcaaaatactatagtgattctgatgatgagcttactgtagaacaacgacgacagtccattgccaaagaaaaagaagagaggcttttaagaaggcaaatcaatagagaaaaacttgaagaaaaacgaaaacagaaagcagaaaagacaaagtcttcaaaaaccaagggtcaaggcaggagtagtgtggacttagaagaatcatcaacaaagagtttggaacctaaagccgccagaattaaagaagtccttaaagaacggaaagttttagaaaaaaaagtagccttaagcaaaaagagaaaaaaagattcaaggaatgttgaagagaactccaaaaagaaacagcaatatgaagaagattccaaagaaacccttaaaacaagtgagcattgtgaaaaggaaaaaatttcttcttcaaaggagctgaagcatgttcatgcaaaaagtgaaccaagtaaacctgcccggagactttcagagtctttgcatgtagttgacgaaaacaaaaatgaatccaaattagaaagagaacataaaagacggacatctacccctgttatcatggagggggtacaggaagagactgacacaagagatgtaaaaaggcaagtagaacgctcagaaatttgcaccgaagagccccagaaacagaaaagcacacttaaaaacgaaaagcatctaaagaaagatgattctgaaacaccacatttgaaaagcctacttaagaaagaggtgaaatcctccaaggagaagcctgaaagagagaaaactccatcggaagacaaattgtctgtgaaacataaatataaaggtgattgtatgcataaaacaggtgatgagactgagcttcactcttctgagaaaggtttaaaagtagaggaaaatattcaaaagcaaagtcaacaaacaaagctttcttcagatgataaaaccgaacgaaaaagtaaacataggaatgaaaggaaattatcagtattaggcaaagatggaaagccagtttctgaatatattataaaaacagatgagaatgttcgtaaagaaaacaacaaaaaagagagacgcttgtcagctgaaaaaactaaggcagagcacaaatcaagaaggtcaagtgattctaaaattcagaaagattctctgggttccaagcaacatggtatcacattacagagaagaagtgaaagttattcggaagataagtgtgatatggactccactaacatggatagtaatttgaaaccagaagaggttgttcacaaggagaaacgacgaacaaagagcttgttagaagagaaacttgtgttgaagtctaaatcaaaaactcaaggcaaacaggtaaaagttgtagaaacagaattacaagaaggtgccacaaaacaggcaaccactccaaaaccagacaaggagaagaacacagaagaaaatgactcagaaaaacagcgtaagtctaaagttgaagacaaaccttttgaagaaactggtgttgaacctgtattagagactgcttcttcttcagcacatagtacacagaaggattctagtcatagagccaagttaccattagcaaaggagaaatataagagtgataaagactccacttccaccaggcttgagagaaagttgtcagatggccacaaaagcagaagcttaaagcatagtagtaaagacataaaaaagaaggacgaaaataaatcagatgacaaggatggtaaagaagttgacagtagtcatgaaaaggccagaggtaatagttcactcatggaaaagaaattaagtagaaggttgtgcgaaaatcggagaggaagcttgtcacaagaaatggccaaaggagaagaaaaattagcagcaaacactttgagcactcccagcggttcctcccttcagagaccaaaaaagagtggtgatatgacattgatccctgaacaagagccaatggaaattgattctgagccaggtgttgaaaatgtgtttgaagtatctaaaacccaagacaaccgcaataataattctcagcaagacattgactctgaaaatatgaaacaaaaaacttctgccactgttcaaaaggatgaattgagaacttgcacagcagattcaaaagcaacagctccagcttataagccaggccgtggaacaggagttaatagtaattctgaaaagcatgccgatcatagaagcaccttgaccaagaaaatgcatatacaaagtgctgtgtccaaaatgaaccctggggagaaagaacccattcatagaggaactactgaagtgaatatagattctgaaactgttcatagaatgttactgagtgccccatcagaaaatgatagggtacagaagaatttgaaaaacacagctgctgaagaacatgttgctcaaggagatgccactcttgaacattccacaaatttagactcctcaccatccttaagttcagtgactgttgtgcctctgagggaatcgtatgatccagatgtaattcctctgtttgacaaaagaactgttttggaaggtagcacagccagcacctcccctgcggatcactctgctctccctaaccaaagtctgactgttagggaatcagaagtccttaagacaagtgacagcaaagaaggtggtgaaggtttcacagtagatacaccagcaaaagcaagcatcactagcaaaagacacattccagaagctcaccaggctactttattggatggtaaacaaggaaaggtaatcatgcctcttggaagtaagttaacgggcgtgattgtggaaaatgagaatattaccaaagaaggtggcttagtggacatggccaagaaagaaaatgacttaaatgcagagcccaatttaaagcagacaattaaagcaacagtagagaatggcaagaaggatggcattgctgttgatcatgttgtaggcctgaatacagaaaaatatgctgaaactgtcaaacttaagcataaaagaagcccaggtaaagtaaaagacatatcaattgatgttgaaagaaggaatgaaaacagtgaggtagacaccagtgctggaagtggctctgcaccctctgttttacaccaaaggaacggacaaactgaggatgtggcaactgggcctaggagagcagaaaagacttctgttgccactagtactgaagggaaggacaaagatgtcaccttaagtccagtgaaggctgggcctgccacaaccacttcttcagaaacaagacaaagtgaggtggctttgccttgcaccagcattgaggcagatgaaggcctcataataggaacacattccagaaataatcctcttcatgttggtgcagaagccagtgaatgcactgtttttgctgcagctgaagaaggtggggctgttgtcacagagggatttgctgaaagtgaaaccttcctcacaagcactaaggaaggggaaagtggggagtgtgctgtggctgaatctgaggacagagcagcagacctactggctgtgcatgcagttaaaatcgaagccaatgtaaatagcgttgtgacagaggaaaaggatgatgctgtaaccagtgcaggctctgaagaaaaatgtgatggttctttaagtagagactcagaaatagttgaaggaactattacttttattagtgaagttgaaagtgatggagcagttacaagtgctggaacagagataagagcaggatctataagcagtgaagaggtggatggctcccagggaaatatgatgagaatgggtcccaaaaaagaaacagagggcactgtgacatgtacaggagcagaaggcagaagtgataactttgtgatctgctcagtaactggagcagggccccgggaggaacgcatggttacaggtgcaggtgttgtcctgggagataatgatgcaccaccaggaacaagtgccagccaagaaggagatggttctgtgaatgatggtacagaaggtgagagtgcagtcaccagcacggggataacagaagatggagaggggccagcaagttgcacaggttcagaagatagcagcgaaggctttgctataagttctgaatcggaagaaaatggagagagtgcaatggacagcacagtggccaaagaaggcactaatgtaccattagttgctgctggtccttgtgatgatgaaggcattgtgactagcacaggcgcaaaagaggaagacgaggaaggggaggatgttgtgactagtactggaagaggaaatgaaattgggcatgcttcaacttgtacagggttaggagaagaaagtgaaggggtcttgatttgtgaaagtgcagaaggggacagtcagattggtactgtggtagagcatgtggaagctgaggctggagctgccatcatgaatgcaaatgaaaataatgttgacagcatgagtggcacagagaaaggaagtaaagacacagatatctgctccagtgcaaaagggattgtagaaagcagtgtgaccagtgcagtctcaggaaaggatgaagtgacaccagttccaggaggttgtgagggtcctatgactagtgctgcatctgatcaaagtgacagtcagctcgaaaaagttgaagataccactatttccactggcctggtcgggggtagttacgatgttcttgtatctggtgaagtcccagaatgtgaagttgctcacacatcaccaagtgaaaaagaagatgaggacatcatcacctctgtagaaaatgaagagtgtgatggtctcatggcaactacagccagtggtgatattaccaaccagaatagcttagcagggggtaaaaatcaaggcaaagttttgattatttccaccagtaccacaaatgattacacccctcaggtaagcgcaattacagatgtggaaggaggtctctcagatgctctgagaactgaagaaaatatggaaggtaccagagtaaccacagaagaatttgaggcccccatgcccagtgcagtctcaggagatgacagccaactcactgccagcagaagtgaagagaaagatgagtgtgccatgatttccacaagcataggggaagaattcgaattgcctatctccagtgcaacaaccatcaagtgtgctgaaagtcttcagccggttgctgcagcagtggaagaaagggctacaggtccagtcttgataagcaccgccgactttgaggggcctatgcccagtgcgcccccagaagctgaaagtcctcttgcctcaaccagcaaggaggagaaggatgaatgtgctctcatttccactagcatagcagaagaatgtgaggcttctgtttccggtgtagttgttgaaagtgaaaatgagcgagctggcacagtcatggaagaaaaagacgggagtggcatcatctctacgagctcggtggaagactgtgagggcccagtgtccagtgctgtccctcaagaggaaggcgacccctcagtcacaccagcggaagagatgggtgacaccgccatgatttccacaagcacctctgaagggtgtgaagcagtcatgattggtgctgtcctccaggatgaagatcggctcaccatcacaagagtagaagacttgagcgatgctgccatcatctccaccagcacagcagaatgtatgccaatttccgccagcattgacagacatgaagagaatcagctgactgcagacaacccagaagggaacggtgacctgtcagccacagaagtgagcaagcacaaggtccccatgcccagcctaattgctgagaataactgtcggtgtcctgggccagtcaggggaggcaaagaaccgggtcccgtgttggcagtgagcaccgaggaggggcacaacgggccatcagtccacaagccctctgcagggcaaggccatccaagtgctgtttgtgcggaaaaagaagagaagcatggcaaggagtgccccgaaataggaccatttgcaggaagaggacagaaagagagcactttacacctcataaatgcagaagagaagaatgtattgttgaactcccttcagaaagaagataagagcccagagacagggacagcagggggcagtagcacagcaagttattcagcaggaaggggcttagaggggaatgctaactcacctgcccacctgagaggaccagaacagacgtctgggcagacggctaaggatccctctgtcagcattcgctatttggcagcagtaaacaccggtgctataaaagctgatgacatgccacctgttcaagggaccgtggctgagcattcctttcttcctgctgagcagcaggggtctgaagacaacttgaaaaccagtaccaccaaatgtattactggccaagaatcaaaaattgctccttcccacacaatgatccctccagctacttacagtgtagctctgttggctcctaaatgtgagcaggacttgactataaagaatgattatagtggcaaatggactgatcaagcatctgctgagaaaacaggagatgataacagcacaaggaaatcattccctgaggaaggagacataatggttactgtgtcttctgaagaaaatgtgtgtgacataggcaatgaagagtctccattgaatgttttgggaggattgaaactgaaagccaacttgaaaatggaggcttatgtgccttcagaggaagagaaaaatggtgaaattctggcaccaccagaaagtctgtgtgggggaaagccaagtggaatagctgaactccagagggagcctttgttggtgaatgaatcactaaatgttgaaaattcaggcttcagaacaaatgaagaaattcatagcgaatcttataacaaaggagagatatccagtggtagaaaagacaacgcagaagccataagcggtcacagtgttgaagcagatcctaaagaggttgaagaggaagaaaggcatatgcctaaaagaaaaagaaagcagcattatctctcttcagaagatgaaccagatgataatccagatgtcctggattccagaatagaaacagcacaaaggcagtgtcctgaaacggagccacatgacacaaaggaagagaactccagagatttggaagaattacctaaaaccagttctgagacaaatagcactacctcaagggtcatggaagaaaaagatgaatatagcagcagtgaaactactggtgaaaagccagagcagaacgatgatgacaccataaaatctcaggaggaagatcagccaataattattaaaaggaaaagaggaagacctcgcaaataccctgtagaaacaacgttaaaaatgaaagacgactccaaaacagatactggcattgtcactgtagaacaatctccatctagcagcaaactgaaagtaatgcaaacagatgaatccaataaagaaacagctaacctacaagaaagaagtataagcaatgatgatggtgaagaaaaaatagtaacaagtgtgcgtcggagaggaagaaaacccaaacgttctctcactgtatcagatgatgctgaatcctcagagccagaaagaaaacgccagaaatcagtttctgatccagtggaggacaagaaagagcaggagtctgatgaggaagaggaagaagaggaagaggacgagccttcaggagccaccacaagatccaccaccagatcagaggctcagagatcaaagacacagctctccccttctatcaagcgcaagagagaagtcagccctcctggggcccgaacaagaggccagcaaagggtggaggaagcccctgtgaaaaaagcgaagcgataatcctgaccactgctgccctaggcttatggaggaacacggtggagaggaaagagacatgccttggtggccataggcttctctttaaccaggaaaaagatatgcatgtgctgtaagtccctaggtgcaagctttttcttgttatgttttaaacagctttataaactattgttcatagaagatattatgtacatttatttcagataaaggacaataagtttactttgtatctgaactcaaaacaaagtagttgtatattttaacattcaaaattgggatttcccaatgtgacacatcatgaatgcaaacccctccagcccatcagacgccaggctgcctactggtaatctgtgtatagtatataaacatgtaaaaataggttgtattttactctatgtatgatgctaatcaatgaacactttatttattttacagagaaaacttatctgtgaactttactatatatctgtttattttactttattttttttttaaataaaaagggttttaaatgctatgcagtcattagtagaaaattttttaggactctgcctgctctgtaactatcttaatatgatctggcagaaactcgcatgtatccaagtaaagtagtttagctaaagaaaggttcttcattgcttttctgttcacagttgtggctctgttttttaagaatgtaacttgtttttagattatacttgcatctgtgactttactaccagccacgttgacacaaaacaggttctggttcaggtaaagttgcgtcagtcacctgcagcagaaatccctcttcattcctcttctctgtgttcattcctcttctgtgctgttctgaagcttctaccaatactctttccatattgtctttttcagtgaagagaaatgcattcaagattaggtccctcctgtctatccagtttcaggattttatgttgttttatacacagttatttcagtatagaaactggctttattgccaagtgtttttttaaacatgttttaactctcatatgagcaaactgtccaacttcagtttttcataagattaaacttcttacgatcaaatttgtctcttgcaatgatgtgatgagttgccaaataattgagattattttaaaatgttttgttcatattcttgttttataattaaaatttacattcagtgtgtatgggtttttttttttattttgactcttaatgtaaggtggatatttctgtcattttacatggtttcttactgagattttatatataaattataaaatgtttacc

SEQ ID NO: 472 - DNA, 2854 bp, HOMO SAPIENS
tatctgcctgggacgccgcgaggcagaagtaggcgggcccattgacttagtgtcaaggcggaggccgcgcttcatgccagcggtcacggaggcagcggaaagccgagccaggcgcctgcgcgctgggaagagtaggttcagagtgcattccggaacccggggcgcggcgcactgcgcaggcggccggactccgctcagtttccggtgcggcgaacaccaaagtccgggaacttaagcattttcggtttctagggttgttacgaagctgcaggagcgagatggaggtggacgcaccgggtgttgatggtcgagatggtctccgggagcggcgaggctttagcgagggagggaggcagaacttcgatgtgaggcctcagtctggggcaaatgggcttcccaaacactcctactggttggacctctggcttttcatccttttcgatgtggtggtgtttctctttgtgtattttttgccatgacttgttcgctgatatctaaattaagaagttggttcttgagtgaattctgaaaatggctacaaacttcttgaataaagaagacaggactctcaatagaagaatttcacatctccaagggacccttcctttcattttacactttgttactaatttgcagaactctattaattgggtaggatttcacccattcctagctaagttcttaaaattaaaccctttggttcgtgtttaaaaactttcaaacatctgatggctttacaggggctgaatataaaagcatttgtacttaaaggtcttgtgtattcattaagaaatatagtaatgtcttttaatgttttaagagttgatcagggtttactatgatgcaagtaataggatgattaataagggaaggtttttatgaattcaaaagtcaattattcaaaagcagggaaagattttgagagagggaacaaagtattcttagattgcgtagaagctgctaggttccagttttaatttttaggtttagttggactctgttatgaaaagataggttatgggtgggcgacaggttgatacagtcttagaaaaagcaggtaatatcaaagtattggaaagctagcatgcatgccctcttacctgggtatcttcccccttttttccttttaaactcttgagcctcctataacgaaggattatgtgtttcaaacctattttttttttactgtttcattaagtgtgcttgtgcccaaaatatttacttgtataatatctgtaacttgcttaaatacttcagcaaagtcagcatatttactcattcaacaaatatttgagccaggcattattttagacacagcagtgaacaaaacaaaaaggcattcttgccttcatggagcttacattcttattgttatttaaatctaaatgttataaaacaagaatttatattctagggttgatcagctagtatttaatcaaaaaggccacactcccatagcagctactctaagctgtagtagctaataaaaaatattaatgttggccgggcacagtggctcacgcctataatcccagcactttgggaggccaagggtggtagatcacttgaggtcaagagttgtgacaccagcctggccaacctggtgaaaccctatctctattaaaaaatacaaaaaaatacaaaaaaattagctgggcatgttggcatgcacctgtagtcccagctatttgggaggctgaggcacgagaattgcttgaatccgggaggtggaggttgcagtgagccaagatggggccactgcactctaacgtgggcaacagagaccctgtctcaaaaagaaaatattcctgttagccctaaaggctttacatgaggaatggtagaagtggtcttttgtttaaattagttgcattcagcatatatgaattgtcttaaatattttggggatactcccccgccttttaaacagggcataagatctggtaaactctctgtatatcttcctacctttcaaaatcgttcttagggttagtcaagtctggaatataattgctgactataaagttagcaattatgcttttaaggtgttgtcacatcaacctaaagagaaccatctatggaaggtatggttgaaacatctgtaggaacacagaactgggatttcactgagtttaccaaatcaactgtgtgaactgtttctgcactgcttgctaatggtttcatctaataaatgtttacttatatagctgagtttggttttattctaacaaattacctggtggtgtgattgtgaggtgattaacagttctcacatagtttactgttaggtcacacacagacttccgatcataatccatactgcctttttgagcctaaaatcagcctactaccacaattaccaaatattctgaaaatttctagtatggtgaagatggagagatcttggtgtgaaggttaattttatatgtcatcttgattatgctaggagatgcccagatttctgggtttgtccatgagggtgtttccagaagagattagcatttgaatcagtagactgaataaaaaagagccacccactccactgcgggtgggccaaccccttgagggcctagctggaataaaaaggcagaggaagggcaaattctgtcttctctctgcttgaacagggacatccatgttctatccttggacattggttctcctgattctctggctttcagacatggaccagggcccctggttctcagacctttgggtttggactggaactacaccattggctttcctgggcttactgtctgcggaaagcagattgtgggacttctcagcctccataatcacaagagccaatccctcataataaatttatttctatataaaaaaaaaaaaaaaa

SEQ ID NO: 473 - DNA, 3752 bp, HOMO SAPIENS
ggccgtgcgagaggccgagcttgctgcattgcagccgccgcggcgccgctcggctcttcactcccaacaatggcggctccgagcccgagcggcggcggcggctccgggggcggcagcggcagcggcacccccggccccgtagggtccccggcgccaggccacccggccgtcagcagcatgcagggtaaacgcaaagcactgaagttgaattttgcaaatccacctttcaaatctacagcaaggtttactctgaatcccaatcctacaggagttcaaaacccacacatagagagactgagaacacacagcattgagtcatcaggaaaactgaagatctcccctgaacaacactgggatttcactgcagaggacttgaaagaccttggagaaattggacgaggagcttatggttctgtcaacaaaatggtccacaaaccaagtgggcaaataatggcagttaaaagaattcggtcaacagtggatgaaaaagaacaaaaacaacttcttatggatttggatgtagtaatgcggagtagtgattgcccatacattgttcagttttatggtgcactcttcagagagggtgactgttggatctgtatggaactcatgtctacctcgtttgataagttttacaaatatgtatatagtgtattagatgatgttattccagaagaaattttaggcaaaatcactttagcaactgtgaaagcactaaaccacttaaaagaaaacttgaaaattattcacagagatatcaaaccttccaatattcttctggacagaagtggaaatattaagctctgtgacttcggcatcagtggacagcttgtggactctattgccaagacaagagatgctggctgtaggccatacatggcacctgaaagaatagacccaagcgcatcacgacaaggatatgatgtccgctctgatgtctggagtttggggatcacattgtatgagttggccacaggccgatttccttatccaaagtggaatagtgtatttgatcaactaacacaagtcgtgaaaggagatcctccgcagctgagtaattctgaggaaagggaattctccccgagtttcatcaactttgtcaacttgtgccttacgaaggatgaatccaaaaggccaaagtataaagagcttctgaaacatccctttattttgatgtatgaagaacgtgccgttgaggtcgcatgctatgtttgtaaaatcctggatcaaatgccagctactcccagctctcccatgtatgtcgattgatatcgctgctacatcagactctagaaaaaagggctgagaggaagcaagacgtaaagaattttcatcccgtatcacagtgtttttattgctcgcccagacaccatgtgcaataagattggtgttcgtttccatcatgtctgtatactcctgtcacctagaacgtgcatccttgtaatacctgattgatcacacagtgttagtgctggtcagagagacctcatcctgctcttttgtgatgaacatattcatgaaatgtggaagtcagtacgatcaagttgttgactgtgattagatcacatcttaaattcatttctagactcaaaacctggagatgcagctactggaatggtgttttgtcagacttccaaatcctggaaggacacagtgatgaatgtactatgtctgaacatagaaactcgggcttgagtgagaagagcttgcacagccaacgagacacattgccttctggagctgggagacaaaggaggaatttactttcttcaccaagtgcaatagattactgatgtgatattctgttgctttacagttacagttgatgtttggggatcgatgtgctcagccaaatttcctgtttgaaatatcatgttaaattagaatgaatttatctttaccaaaaaccatgttgcgttcaaagaggtgaacattaaaatatagagacaggacagaatgtgttcttttctcctttaccagtcctatttttcaatgggaagactcaggagtctgccacttgtcaaagaaggtgctgatcctaagaatttttcattctcagaattcggtgtgctgccaacttgatgttccacctgccacaaaccaccaggactgaaagaagaaaacagtacagaaggcaaagtttacagatgtttttaattctagtattttatctggaacaacttgtagcagctatatatttccccttggtcccaagcctgatactttagccatcataactcactaacagggagaagtagctagtagcaatgtgccttgattgattagataaagatttctagtaggcagcaaaagaccaaatctcagttgtttgcttcttgccatcactggtccaggtcttcagtttccgaatctctttcccttcccctgtggtctattgtcgctatgtgacttgcgcttaatccaatattttgccttttttctatatcaaaaaacctttacagttagcagggatgttccttaccaaggatttttagccccaaatctctcatattcgctagtgtttaaaaggctaagaatagtggggcccagccgatgtggtaggtgataaagaggcatcttttctagagacacattggaccagatgaggatccgaaacggcagcctttacgttcatcacctgctagaacctctcgtagtccatcaccatttcttggcattggaattctactggaaaaaaatacaaaaagcaaaacaaaaccctcagcactgttacaagaggccatttaagtatcttgtgcttcttcacttacccattagccaggttctcattaggttttgcttgggcctccctggcactgaaccttaggctttgtatgacagtgaagcagcactgtgagtggttcaagcacactggaatataaaacagtcatggcctgagatgcaggtgatgccattacagaaccaaatcgtggcacgtattgctgtgtctcctctcagagtgacagtcataaatactgtcaaacaataaagggagaatggtgctgtttaaagtcacatccctgtaaattgcagaattcaaaagtgattatctctttgatctacttgcctcatttccctatcttctcccccacggtatcctaaactttagacttcccactgttctgaaaggagacattgctctatgtctgccttcgaccacagcaagccatcatcctccattgctcccggggactcaagaggaatctgtttctctgctgtcaacttcccatctggctcagcatagggtcactttgccattatgcaaatggagataaaagcaattctgactgtccaggagctaatctgaccgttctattgtgtggatgaccacataagaaggcaattttagtgtattaatcatagattattataaactataaacttaagggcaaggagtttattacaatgtatctttattaaaacaaaagggtgtatagtgttcacaaactgtgaaaatagtgtaagaactgtacattgtgagctctggttatttttctcttgtaccatagaaaaatgtataaaaattatcaaaaagctaatgtgcagggatattgccttatttgtctgtaaaaaatggagctcagtaacataactgcttcttggagctttggaatattttatcctgtattcttgtttgaattcctcctctatttaagatatatacatggaatcgaagtgtttatgtaatagttctatccttttgcctgcaggtcagttgtaataaatctaggatgtgatgatgaaaaaaaaaa

SEQ ID NO: 474 - DNA, 688 bp, HOMO SAPIENS
agccccgccccaggcgagggcgccgcacccacaccgcgctgcgcagttttgttctgctccagctgttcgaaggtgatccagacgcaagatggctgtcctctctaaggaatatggttttgtgcttctaactggtgctgccagctttataatggtggcccacctagccatcaatgtttccaaggcccgcaagaagtacaaagtggagtatcctatcatgtacagcacggaccctgaaaatgggcacatcttcaactgcattcagcgagcccaccagaacacgttggaagtgtatcctcccttcttattttttctagctgttggaggtgtttaccacccgcgtatagcttctggcctgggcttggcctggattgttggacgagttctttatgcttatggctattacacgggagaacccagcaagcgtagtcgaggagccctggggtccatcgccctcctgggcttggtgggcacaactgtgtgctctgctttccagcatcttggttgggttaaaagtggcttgggcagtggacccaaatgctgccattaaagaattataggggtttaaaaactctcattcattttaaatgacttacctttatttccagttacattttttttctaaatataataaaaacttacctggcatcagcctcatacctaaaaaaaaaaaaaaaaaaaaaaaaaaaaa

SEQ ID NO: 475 - DNA, 9059 bp, HOMO SAPIENS
gcggagacccgagccggatgtgccaagatggctgcggcggctgaggtgtctgtgctcgtcgccagcgtcgggtgggctttcgcccgcggctcctgagggatcggtctcagccgcgcggagaccgtcttgctctgttgcccaggctggaccgcggtggtataatcatagctcactgcagcctcgaactcatggacacaagtgatcttccttccttaaccccctgagtccctgggactacagctccaattaaggaacagctatatcctgcttccttctgtaagcagcatcgacttgtgcaagggttcagtcatgcagccaccgccccagacggtcccgtctggcatggctgggccacctccagccgggaatcctcggagcgtgttctgggctagcagcccttacaggagacgggctaataataatgcagcagtggctccgacaacttgcccgttgcagccggtcacggatccatttgcttttagtagacaggcgctccaaagtacaccactgggcagttcgtccaaaagcagtccacctgtcttgcaaggcccagcccccgcagggttttctcagcaccccggtttgcttgttcctcacacacatgccagagatagctctcagggaccctgtgagcccctgcctggacctctgacacagcccagagcacatgccagtccgttttctggtgcattgacaccttcagcacctcctgggcctgagatgaacaggagtgcagaggtcggtcccagttcagagcctgaagttcagactctgccatatcttcctcactacattccaggagtggatcctgaaacgtctcatgggggccaccctcatgggaacatgcctgggctcgaccgacccctgagcaggcaaaacccacatgacggtgtggtcaccccagcagcatccccttccctccctcagcctggtctgcagatgccaggacagtgggggccagtgcagggaggcccacagccctcggggcaacatcgttcaccctgccctgaaggacctgttcccagcggggtgccctgtgccaccagcgttcctcatttccccaccccgtccatcctacatcagggccctggtcatgagcaacacagccctctggtggctcccccagcagccttgcccagtgacggaagagacgaggtgagccacttgcaaagtggaagccacctggccaataactctgatcctgaaagtacattcaggcaaaatcccagaattgtgaatcactgggcaagcccagagctcaggcagaatccaggagtgaagaatgagcaccggcccgcctctgctcttgtgaaccccctcgcccggggagatagcccagaaaaccgtacgcaccacccactgggggctggggccgggtctggctgtgccccgctagaagcagactcaggagcttcaggagctctggcgatgtttttccaagggggagagacagaaaatgaggagaatctctcatctgaaaaagcaggcttatctggtcaagcggactttgacgatttctgctccagccctgggctaggccgtccgcccgcacctacacacgtgggggcaggcagcctctgccaggcccttctcccaggccccagcaatgaggctgctggtgatgtgtggggtgacacagcgagcacaggggtgccggatgccagcggctcgcagtatgagaatgttgagaacttagaatttgttcagaatcaagaagttctgccaagtgagcccctcaatttggacccttcctccccgagtgaccagttcagatatgggccccttcctgggccagctgtgcccaggcatggtgctgtgtgccacaccggagcccctgatgccacactgcatacagtgcaccctgacagcgtgtcatccagctatagcagcagaagccacggaaggctctcaggctcagccaggccccaggagctggttggcacattcattcagcaagaagttggaaaacccgaggatgaagcttcaggtagtttttttaagcaaatcgattcttctcccgtaggaggtgaaacagacgagaccactgtgagccagaattaccgtggcagcgtgtcccagccctcaaccccgagccccccgaaacctacaggaatatttcagacaagtgcaaatagttctttcgaaccggtaaaatctcacttagttggggtaaaaccatttgaggcagatcgcgccaacgtggttggtgaagtaagggagacctgtgtccgccagaagcagtgcagaccagctgccgccctgcccgatgcttcccctggcaacctggagcagccaccagacaacatggagaccctctgtgcaccccaggtctgtcccctgcctcttaactccaccacggaagctgtgcacatgcttccgcacgcaggggcaccgcccttggatactgtgtatccagcacccgagaagaggccttcagccaggacccaggggcccgtgaagtgtgagagcccagcaacgactctgtgggcgcaaagtgagctgccagattttggaggcaacgtccttctggcccctgcagccccggcgctttatgtgtgtgcaaaacctcagccacctgttgttcagcctccagaagaggcgatgtccgggcagcagtcacggaacccaagctcggcggccccggtgcagagccgaggtggcattggtgcttctgagaaccttgagaatcctcccaaaatgggagaggaggaggcccttcagtcccaggcgagttctggttatgcaagtttattatcctcaccgcccactgagtctctgcagaatcctccagtcttgattgctcagcctgatcacagctataatctggctcagcccattaacttttctgtgtccttatcgaactctcatgagaagaatcagtcctggagagaggctttggtgggggatagacctgcagtcagcagttgggctctcggtggtgattctggggagaacacttctttgtctgggattccaaccagctctgtccttagcttgtctctgcctagcagtgttgcccaaagtaattttccacaaggttctggtgcttccgaaatggtttctaatcagcctgctaatttgctggttcaaccaccatcccagccagttccagagaacttggttccagaaagtcaaaaggatcgtaaggcaggaagtgctcttcccggatttgctaatagccctgctggaagcacaagtgtggtgttagttccacctgcacacggcaccctggtgcctgatggtaataaggcaaaccattccagtcatcaggaagacacttacggagccctagactttaccttaagcaggactttggaaaatcctgtaaacgtgtacaacccgtcccattctgacagcctcgcttctcagcaaagtgttgccagtcatcccagacaatctgggcctggggcgcctaaccttgaccgtttttatcagcaggtcacgaaagatgcccagggccagcctggcctcgaaagagcccagcaggagctggtgccaccccagcaacaggcttctcccccacaactacccaaagccatgttttcggagctgtcaaatccagaaagtctgcccgcacagggacaggcccagaactcagcacagtcaccagcaagtctggttctggtcgacgcgggtcagcagctgccccctcggcctcctcagtcctctagcgtgtctctggtgtccagtggctccggccaggcagctgtgccgtcagagcagccgtggccacagccagtgcctgcacttgcccccggcccaccgcctcaggacctggccgcctactactactaccggcctttgtacgatgcctaccagcctcagtactctttgccgtacccaccggagcctggcgcagcctccctctattaccaggatgtctacagcctctatgagcctcgatacaggccctatgatggtgctgcgtctgcttacgcccagaactaccgctatcccgagcccgagcggcccagctcccgagccagccactcctcggaacggccacctcccaggcaaggatatcctgaaggatactatagttccaaaagtggatggagcagtcagagcgattactatgcaagctattactccagccagtacgattatggagatccaggtcactgggatcgttaccactacagtgctagagtcagggacccccgcacctatgaccggaggtattggtgtgatgcagagtatgacgcatacaggagagagcactctgccttcggggacaggcccgagaaacgtgacaacaactggaggtacgatcctcgcttcacggggagttttgacgatgaccccgatccgcacagagacccttatggggaagaggtggaccggcgcagcgtccacagcgagcactcggcacggagcctgcacagcgcacacagcctggccagccgccgcagcagcctcagctcccactcgcaccagagtcagatttacagaagccacaatgtggctgccggttcctacgaggccccgcttcctccaggctcctttcacggcgattttgcctacggcacctaccgcagcaatttcagcagtggccccggcttcccagagtatggctaccctgccgacaccgtctggcctgccatggagcaagtttcatcaagaccaacttctcctgaaaaattttcagtgcctcatgtctgtgccaggtttggccctggcggtcagcttatcaaagtgattcccaatctgccttcagaaggacagccggccttggtggaggtccacagcatggaggccttgctgcagcacacgtctgagcaggaggagatgcgggcgttcccgggacccctggccaaagacgacacccataaggtggatgtcattaattttgcacagaacaaagctatgaaatgtttgcagaatgaaaacttaattgacaaagagtctgcaagtcttctttggaattttattgttctcttatgcagacaaaatgggaccgtggtagggaccgacattgcggagcttctgttacgagaccacagaacagtgtggcttcctgggaagtcgcccaatgaagcaaacctgattgatttcacgaatgaggcagtggagcaggtggaagaggaggagtctggtgaggcccagctctctttcctcactggtggtccggcggctgccgccagctcgctcgagagagagaccgagaggttcagggagctgttgctgtatggccgtaagaaggatgctttggagtctgcaatgaagaatggcctgtggggtcacgctctgctacttgcaagtaagatggacagccggacacacgcccgagtcatgaccaggtttgctaacagcctcccaatcaacgaccctctgcagacagtctaccagctcatgtccggacggatgcctgccgcgtccacgtgctgtggagacgagaaatggggagattggaggccgcacctcgccatggtcttgtccaacttgaacaacaacatggacgtcgagtccaggacgatggctaccatgggcgacactctggcttcaaggggcctcttggatgcggcccacttctgctacctcatggcccaggcgggatttggtgtttacacgaagaaaactacaaagcttgtcttaatcggatccaatcacagtttgccattcttaaagttcgcaaccaacgaagcaatccagaggacggaagcctatgagtacgcccagtccctgggtgccgagacctgccccctgcctagtttccaggtgtttaagttcatctactcctgccgcctggcggaaatggggctggccacgcaagccttccactactgtgaggccatcgcgaagagcatcctgacgcagccgcacctgtattccccggtgttgatcagccagcttgtgcagatggcttcccagttacgactcttcgatccccagctgaaagagaagccagaagaggagtccttggccgcacccacgtggctggttcacctgcagcaggtggagcggcagattaaggagggggctggagtatggcatcaggatggagccctcccgcagcagtgtcctggcactccgagttccgagatggagcagttggacaggccaggactcagtcagccaggagccctggggatcgccaaccctctgctggcggtgcctgcaccgagccctgagcactcgagcccgagcgtgcggctgctgccctcagctccgcagacgctccctgacggcccattggccagtcctgccagagtgccgatgttcccagtgccactgcccccggggcccctggagccgggtcctggctgtgtgaccccagggcctgcacttggcttcctggagccctccgggcctggcctcccacctggtgtgccacctctgcaggaaaggagacacttgctccaggaagccaggagcccagacccagggatagtgccgcaggaggcgcctgttggaaactcactttccgagctaagcgaagaaaattttgatggaaaatttgctaatctgaccccctcgaggacggtgccagactcggaggcccccccagggtgggatcgtgccgactcgggtcccacgcagccacctctgtctctctcacccgctcccgaaacaaagagacccggacaggcagccaagaaagaaacgaaggaacctaagaagggtgaatcctggttctttcgttggctacctggaaagaaaaagacagaagcttatttgccagatgacaagaacaaatcgattgtttgggatgaaaagaaaaaccagtgggtgaatttaaatgagccagaagaggagaagaaagccccgcccccacctccaacctcgatgcccaagactgtgcaagctgccccgcctgccctcccagggcctcctggagcccccgtgaacatgtactctagaagagcagcaggaaccagagctcgctacgttgacgtcctgaacccaagcgggacccagcggagcgagccggctctcgctcctgcggactttgtcgctccactcgcgccactcccaattccttctaacttgttcgtgccaaccccagatgcagaagaaccacagcttccagacgggactggcagggaagggcctgcagcagctaggggcctggccaatccagagcctgccccagagcccaaggttttaagctctgcagcgtcactccctggctctgaactcccctcctccaggcctgagggttcccagggaggagagctttcgcgctgtagttcaatgagttcattatcacgtgaagtgagccagcattttaatcaggctcctggcgacctccctgctgcagggggccctcccagcggggccatgcccttctacaaccctgctcagctggcacaggcctgcgccacctccgggagctcaaggctagggaggattggccagaggaagcacctggtgctgaactaggcttgccctgctgtgaacttgcacttggagccctgacgctgctgttctccccgaagaacccgaccgacctccgcgatctccgtcccgcccccagggagacacagcagtgactcagagctggtcgcacactgtgcctccctcctcaccgcccatcgtaatgaattattttgaaaattaattccaccatcctttcagattctggatggaaagactgaatctttgactcagaattgtttgccgaaaagaatgatgtgactttcttagtcatttaggatgatttaaggatatagtattcctggtcatttaagaatgttcattcattgaagccggagctgtctctgccacaggagagccacatggtcggtagtaaccagggcctctccaagcccagctgtgagtcactgcccagtgagtcccgcgcttcctttaaggtgctgggagcaaagagagggtgactgaggcagaccccaacccctgctctgcaccatctgggccctcgccgtgtttgaacctggctgaatgagtggagggcgctgtgttctcaatcagcgcctccgaggagccgtggggttccttcggcattagttcacggtttttgagagaggccttagttactgcagtgaatttctttcctgttgcaaagacgcttccagcctcactttactttctgtggcctgatgaggaccatgggtgattttgtgtacccaaagcgctggggactgcccaccgtgtggcccagtcactgggaaggagccccagagagccggctgtctgacatgatggctcagggtggtcatccaggttgaaaactgaccgtgtgatgtttgatttgggcttcatttcgtgtgtaggagcacggttagactcactgttaaggaagctggatgcacttctctaaaaggctgcactttccgtgagcacttttcgtggtacaatccacatgacccactttctcccctgggggacgttggttcagaggttggtagcacttggggagagtatcttaacacagtttcttgacagcagctctggaacttagtatttctgccccgagttttgccacactgagactttgagtagctcctggtggactcaaccctgttcaactcagagacgggcctcctctcactgatgcaaagctttaaggcttctctgactgttctgaaactcttcgtattcttgtcaagtctaaagagactgaagaaaagatttaaatactaataaaaatcagtagataatttctgtaggttctgctggaggaatacaaactgtttggtgttttaaatttaagtgtagaaattgtagaatgtggaattagcacagatccttcctggctttctgtttcacttgatcatttagcccagaccacccaggatgttttccaaaatgttccacaggcgtgtcccgctggatccatttgtccttgtcacttggagaaaggccagtccctgtgacggggcagccctctctgtccctcggtcagctcgtgtgaatcctgggacctcttccggtcggctctgcccgctgttctggggtcgactgccacgacttttgattcaagaagcttcctccaggcgggagcggctatttttcctaaatgagaattgttacattgcaaattgttgaataaaatattttgcgctccttcaagcaccttcaaaaaaaaaaaaaaaaaa

SEQ ID NO: 476 - DNA, 7279 bp, HOMO SAPIENS
gggcctctgattcatctttattccctccatcatctagacttgattttatttgtaccaaggagatgcgtgtctaatgtttttctttcttctatttctaggagggctgttggcctgctgctgtgctgctgaacagtatgcagtcctttcgggagcaaagcagttaccacggaaaccagcaaagctacccacaggaggtacacggctcatcccggctagaagagttcagccctcgtcaggcccagatgttccagaattttggaggtacaggtggcagtagtggcagcagtggcagtggcagtggtggtggacgacgaggagcagcagctgctgcggcagcgatggctagcgagacctctggccatcaaggttaccagggtttcaggaaagaggctggagatttttactacatggcaggcaacaaagaccccgtgactacaggaaccccacagcctcctcagcgaaggccttctgggcctgtgcagagctatggacccccccaggggagcagctttggcaatcagtatgggagtgagggtcatgtgggccagtttcaagcacagcactctggccttggcggtgtgtcacattatcagcaggattacactgggcctttctctccagggagtgctcagtaccaacagcaggcttccagccagcagcagcagcagcaagtccagcagttgagacaacagctttaccagtcccatcagcccctgccacaggccactggccaaccagcatccagctcatcccatctacagccaatgcagcggccctcaactctgccatcctctgctgctggttaccagttaagagtgggtcagtttggccaacactatcagtcttctgcttcctcctcctcctcctcctccttcccttcaccacagcgttttagccagtctggacagagctatgatggcagttacaatgtgaatgctggatctcagtatgaaggacacaatgtgggttctaatgcacaggcttatggaacacaatccaattacagctatcagcctcaatctatgaagaattttgaacaggcaaagattccacaagggacccaacaggggcagcagcagcagcaaccgcagcaacaacaacacccttctcagcatgtgatgcagtatactaacgctgccaccaagctgcccctgcaaagccaagtggggcagtacaaccagcctgaggttcctgtgaggtcccccatgcagtttcaccagaacttcagccccatttctaacccttctccagctgcctctgtggttcagtctccaagctgtagttctaccccatctcctctcatgcagactggggagaatctccagtgtgggcaaggcagtgtgcctatgggttccagaaacagaattttacagttaatgcctcaactcagtccaaccccatcaatgatgcccagtcctaattctcatgctgcaggcttcaaagggtttggactagaaggggtaccagaaaagcgactgacagatcctgggttgagtagtttgagtgctctgagtactcaagtggccaatcttcctaacactgtccagcacatgttactttctgatgccctgactcctcagaagaagacctccaagaggccctcatcttccaagaaagcagatagctgcacaaattctgaaggctcctcacaacctgaagaacagctgaagtcccctatggcagagtcattagatggaggctgctccagcagttcagaggatcaaggcgagagagtgcggcaactaagtggccagagcaccagctctgacaccacctacaagggtggagcctctgagaaagctggctcctcaccggcacaaggtgctcagaatgaaccccccagactcaatgctagtcctgccgcaagagaagaggccacctcaccaggcgctaaggacatgccattgtcatccgacgggaacccaaaggttaatgagaagactgttggggtgattgtctcccgggaagccatgacaggtcgggtagaaaagcctggtggacaagataaaggctcccaagaggatgatcctgcagccactcaaaggccacctagcaatggtggggcaaaggaaaccagtcatgcatcacttccccagccagagcctccaggaggaggagggagcaaaggaaacaagaatggcgataacaactccaaccataatggagaaggaaatggccagagtggccactctgcagcgggccctggttttacgagcagaactgagcctagcaaatctcctggaagtctgcgctatagttacaaagatagtttcgggtcagccgtgccacgaaatgtcagtggctttcctcagtatcctacagggcaagaaaagggagatttcactggccatggggaacgaaagggtagaaatgaaaaattcccaagcctcctgcaggaagtgcttcagggttaccaccaccaccctgacaggagatattctaggagtactcaagagcatcaggggatggctggtagcctagaaggaaccacaaggcccaatgtcttggttagtcaaaccaatgaattagctagcaggggccttctgaacaaaagcattgggtctctattagaaaatccccactggggcccctgggaaaggaaatcaagcagcacagctcctgaaatgaaacagatcaatttgactgactatccaattcccagaaagtttgaaatagagcctcagtcatcagcacatgagcctgggggttccctctctgaaagaagatcagtgatctgtgatatttctccactaagacagattgtcagggacccaggggctcactcactgggacacatgagtgccgacaccagaattgggaggaatgaccgtctcaatccaactttaagtcagtcggtcattcttcctggtggtttggtgtccatggaaaccaagctgaaatcccagagcgggcagataaaagaggaagactttgaacagtctaaatctcaagctagtttcaacaacaagaaatctggagaccactgccatcctcctagcatcaagcatgagtcttaccgcggcaatgccagccctggagcagcaacccatgattccctttcagactatggcccgcaagacagcagacccacgccaatgcggcgggtccctggcagagttggtggtcgggagggcatgaggggtcggtccccttctcaatatcatgactttgcagaaaaattgaaaatgtctcctgggcggagcagaggcccagggggagaccctcatcacatgaatccacacatgaccttttcagagagggctaaccggagttctttacacactcccttttctcccaactcagaaaccctggcctctgcttatcatgcaaatactcgggctcatgcttatggggaccctaacgcaggtttgaattctcagctgcattataagagacagatgtaccaacagcaaccagaggagtataaagactggagcagcggttctgctcagggagtaattgctgcagcacagcacaggcaggaggggccacggaagagtccaaggcagcagcagtttcttgacagagtacggagccctctgaaaaatgacaaagatggtatgatgtatggcccaccagtggggacttaccatgaccccagtgcccaggaggctgggcgctgcctaatgtctagtgatggtctgcctaacaagggcatggaattaaagcatggctcccagaagttacaagaatcctgttgggatctttctcggcaaacttctccagccaaaagcagcggtcctccaggaatgtccagtcaaaaaaggtatgggccgccccatgagactgatggacatggactagctgaggctacacagtcatccaaacctggtagtgttatgctgagacttccaggccaggaggatcattcttctcaaaaccccttaatcatgaggaggcgtgttcgttcttttatctctcccattcccagtaagagacagtcacaagatgtaaagaacagtagcactgaagataaaggtcgcctccttcactcatcaaaagaaggcgctgataaagcattcaattcctatgcccatctttctcacagtcaggatatcaagtctatccctaagagagattcctccaaggaccttccaagtccagatagtagaaactgccctgctgttaccctcacaagccctgctaagaccaaaatactgcccccacggaaaggacggggattgaaattggaagctatagttcagaagattacatccccaaatattaggaggagcgcatcttcgaacagtgcggaggctgggggagacacggttacgcttgatgatatactgtctttgaagagtggtcctcctgaaggtgggagtgttgctgttcaggatgctgacatagagaagagaaaaggtgaggtggcttcggacctagtcagtccagcaaaccaggagttgcacgtagagaaacctcttccaaggtcttcagaagagtggcgtggcagcgtggatgacaaagtgaagacagagacacatgcagaaacagttactgccggaaaggaaccccctggtgccatgacatccacaacctcacagaagcctggtagtaaccaagggagaccagatggttccctgggtggaacagcacctttaatctttccagactcaaagaatgtacctccagtgggcatattggcccctgaggcaaaccccaaggctgaagagaaggagaacgatacagtgacgatttcaccgaagcaagagggtttccctccaaagggatatttcccatcaggaaagaagaaggggagacccattggtagtgtgaataagcaaaagaaacagcagcagccaccgcctccaccccctcagcccccacagataccagaaggttctgcagatggagagccaaagccaaaaaaacagaggcaaaggagggagagaaggaagcctggggcccagccgaggaagcgaaaaaccaaacaagcagttcccattgtggaaccccaagaacctgagatcaaactaaaatatgccacccagccactggataaaactgatgccaagaacaagtctttttacccttacatccatgtagtaaataagtgtgaacttggagccgtttgtacaatcatcaatgctgaggaagaagaacagaccaaattagtgaggggcaggaagggtcagaggtcactgacccctccacctagcagcactgaaagcaaggcgctcccggcctcgtcctttatgctgcagggacctgttgtgacagagtcttcggttatggggcacctggtttgctgtctgtgtggcaagtgggccagttaccggaacatgggtgacctctttggacctttttatccccaagattatgcagccactctcccgaagaatccacctcctaagagggccacagaaatgcagagcaaagttaaggtacggcacaaaagtgcttctaatggctccaagacggacactgaggaggaggaagagcagcagcagcagcagaaggagcagagaagcctggccgcacaccccaggtttaagcggcgccaccgctcggaagactgtggtggaggccctcggtccctgtccagggggctcccttgtaaaaaagcagccactgagggcagcagtgaaaagactgttttggactcgaagccctccgtgcccaccacttcagaaggtggccctgagctggagttacaaatccctgaactacctcttgacagcaatgaattttgggtccatgagggttgtattctctgggccaatggaatctacctggtttgtggcaggctctatggcctgcaggaagcgctggaaatagccagagagatgaaatgttcccactgccaggaggcaggcgccaccttgggctgctacaacaaaggctgctccttccgataccattacccgtgtgccattgatgcagattgtttgctacatgaggagaacttctcggtgaggtgccctaagcacaaggtgagactgtggagatgagaaggtggtggacactcgtgatggaatggaaatcgtcctaccgtgcagccacaccctgccctgccccgccccgccccgcccgcgtgcctgcccatgccagcacttccttaagttctcacatcacactcaaaccagtgacaccacaggaaagaaagacccaagacgttggaatggctgtttccatggacacaatctccatagtgacaatgtggggggaggggggaggggtgggatgatggggaaagggtggggggaattaaaagggagggataaatatatatatataaatctatttttagtctggaaagactttgtttaaatgaaaggtgcgctatcccttttgattctgttttaaaattatctcgttaaagatctccaaatttgttccgatgacaagtgaaatttaaatgtgagattgaactgaacaaaccctcatctcatgaaggacggggtgtgtgtgtggcgttgatctttagcctgtctcacaccagttcagaaaacactagacccaggattgaaaaagcaaaccacagcagaaccatccttttgtcattaatttgtctcaaagtgggaaggttttgggggagggggaaatacagggatggtccatgttttcaagagtaggggaatgatgtttaaacacaaaaataaattttttttcatttccagaaacactatttatttatggttttttttttttaattttttctttttgggggtgaaattggcagatgcctgaggtcatagctgtgtcctgggtcactgtggctggtgaggacctcaaggaccccatcaagtgtacacagcagcagcaaaatcaagggatgaccctcctctggggccccctgtcctcagcacattccaggcagctgtgccctgacccacagggacccgtggggatgggaggaggtccaggcctgtgttgccagagctggcagtgtgagctgtaggcagggacggggagggactgtcgctgtgatcagagtgggttaagctgaccaggaacacccatttaacccctttttctttttgctttcatttttataaaggaaaagaggacctgtcagataggcagccccatgctacgtgattctttatgttgtgttgttttgttttgtaaattgtataatttttaaatatctgagttttaaaaaaagaaaaaagtacaaaaaaatcttgttatggccttaagaaggggttagtgcatctttcaggggtcactctgccatggggataaaatagctgtttcacaaacagttttatttaaaaaaacaaaaaacaaaaaaaatcaaaaaatcaaaaaaataataaacttcattttaaccttg

SEQ ID NO: 477 - DNA, 25 bp, HOMO SAPIENS
gctgttggcatccttgggacctgct

SEQ ID NO: 478 - DNA, 5968 bp, HOMO SAPIENS; identical to SEQ ID NO: 260

SEQ ID NO: 479 - DNA, 5919 bp, HOMO SAPIENS
ccccccgccccggcccggcccggcccggccgcagccccgctgggcgccgcagagatgacggatcctttctgcgttggaggccgtcggctcccggggtccagcaagagtggtcccgggaaggatggcagccgaaaggaggtccgacttccaatgctgcatgacccaccgaagatggggatgccggtggtccgtggtggacagacagtgcccggccaggcccctctctgctttgacccgggaagtccagccagtgacaagacagaagggaagaaaaaggggcggccaaaagccgagaaccaggccctccgagacattcctctctccctgatgaacgactggaaggatgagttcaaggcacactcgagggtgaagtgtccaaactcagggtgctggctggagttccccagcatctacgggctcaagtaccattaccagcggtgccaagggggtgccatctcagatcgcctggccttcccctgccccttctgcgaggccgcattcacctctaagacccagctggagaaacaccggatctggaaccacatggaccgacccctgcctgcctccaagcctgggcccatcagcaggccggtcaccatcagccggcctgttggggtcagcaagcccatcggagtgagcaaacctgtcactattggcaaacctgtgggtgtcagcaaacccattggcatcagcaagccagtctcggtcggcagacccatgccagtcaccaaggccatcccggtcactaggcccgtgccagtcaccaaacctgtcacagtcagcaggcccatgcccgtcaccaaggccatgccggtcaccaaacccatcacagtcaccaagtctgtgccggtcaccaaacccgtacctgtcaccaaacccattacggtaacaaagcttgtgacagttacgaaacccgtgccggtcaccaagccagtgacagtcagcaggcccattgtggtcagcaagccggtgacagtcagcaggcccattgctatcagcagacacacaccgccctgcaaaatggtgctgctgaccaggtcggagaacaaagcacctcgtgccacagggaggaacagtggtaagaaaagggctgcggacagcctggacacctgcccaattccacccaagcaggccaggccagagaatggggagtacggcccctcctccatgggccagagctcggccttccagctgagtgcagacaccagcagtggctccttgtcgccaggcagcaggccgtcagggggcatggaggcactgaaggctgcaggccctgcgtccccgcctgaggaggacccggagcgcacaaagcacagaaggaaacagaaaacacccaaaaagtttacaggggagcagccatccatctcagggacctttgggctcaaaggcctggtcaaagctgaggacaaggcccgagttcaccgctccaagaagcaggaggggccaggccctgaggacgcccggaagaaggtgccagctgcccccatcactgtcagcaaggaggcaccggcccctgtggcccacccagctccaggtggccctgaagagcagtggcagagggccatccatgagcgcggggaagccgtctgccccacctgcaacgtggtcacccggaagactctcgtggggcttaagaagcacatggaggtgtgtcagaagcttcaggatgcactcaagtgccagcactgccggaagcagttcaagtccaaagccggcctcaactaccacactatggccgagcacagtgccaagccctctgacgccgaggcctccgaagggggcgagcaggaggagcgcgagaggctgcgcaaggtgctgaagcagatgggacggctgcgctgcccccaggagggttgcggggctgccttctccagcctcatgggctaccagtaccaccagcggcgctgcgggaagccgccctgcgaggtggacagcccctccttcccctgcacccactgtggcaagacgtaccgatccaaggctggccacgactaccacgtgcgctcggagcacacggcccccccccctgaggagcccacagacaagtcccctgaggctgaggacccgctgggtgtggagcggaccccaagcgggcgtgtccgccgcacgtcggcccaggtggcggtgttccacctgcaggagatagcggaggacgagctggcccgcgactggaccaagcggcgcatgaaggatgaccttgtgcccgagaccgcacggctcaactacactcgaccagggctccccacgctgaacccccagctgctagaggcatggaagaatgaagtgaaggagaaaggccacgtcaactgtcccaacgactgctgtgaagccatctactccagcgtgtccggactcaaggctcatctcgccagctgcagtaagggggcccacctggcagggaagtaccgctgtctgctgtgtccgaaggagttcagttctgagagtggcgtcaaataccacatcctgaagacccacgcagagaactggttccgaacatcagcagacccacctcccaaacacaggagccaggactcattggtgcccaagaaggaaaagaagaaaaatctggcaggtggaaagaagcggggccgaaagcccaaggagcggaccccagaggagcctgtggccaagctgcccccgcgccgggacgactggcctccaggatgcagagacaagggggcccggggctccaccggccggaaggtgggagtcagcaaggcgcctgaaaagtgagcatggtgcgtggggcctggcccccatgcagccgccacaccgccctctgttcaaggcagggccagctccgggacctctgtcctccagttctccatcccccacccccgcctcttcatccgtccagtggggcagccagccactctcccttccctgaaggtggcccttcccctgttaaggctgccacagggcacacctgggttggggctccccaaggtgtgcccagcagaagtgcaatagccaggagggttgcccctcctcatgggaatgtgtctggggtcttggtgccacaggggctgcagcgcagagtaggcagatggcctttggccccccggctccgcttcctcaggccctgccgggtcccttccctggctaccccaaggctcaggcatccctggtgacctgtggttctgggctggtgagggcacctgagcaacctggcacgggcagccaccatcctggcctcacctccacccaacactggaactccagcacccccagctacctcccaggacagacccctgtctgaccactgccatgctgacctgacaggctccggcctgcccttggccacccacttggtccccttgcttctgttttctacctctccaggcctgcccactacccccacccctgctcctcctttgtcagtgcgatccctgctgtgctcaggccctgccccccaggcctgtctgtaattctcccagcttggggcaagggaggggttttgcttcttgtacctacagggcagcagaagcttgatgcccttcaacacagctgccagccctgggggtgtggggcccctggagtgtgctctcctccagtgttcagccttctggcactgcaggcctaggttggagcagcctcgtggagtagggacggactagttcgggccctggggtcttgctggggcccataggcatgtggggcaggaagctgggcagagctggcctggctctgagtggccactgggggaaaggcagccttctgtctgccaatctgggtaggcccagtggccaagctctcatgggagccccctccccacttttttttttaacctgcccccattgtttctggttgtgtggtcatttgatatgggaactgaaggccagccaggggaggggcttggccaaagtcacagcaggttgatggcagctccagagctgtctttgcccctttgtggccctgaggacggctgggtctataggtagggcaggggtcaggcagggagtccagggtgcctggaagaggtggccacagcctgtggctccctccctggggtcctgccttccaaccacggcattgcagggaggatgaggctcagagggggtaggtttggagggaggccattttccagggtgggtgggagtgggctgagggctcggccccactgaccctggacgatgagaattttgatgtttgcccgtgtgcgtgtgtctcctgggtgtagtggatgccagtcttgttgctgtgacaagtaacaaccttttttttaaattgttttttatacaaacactcgcaatccgacatttggtgctaagggtttcctggtgcagacggtgggcctgggggctgggctggaccagggcgtgggtctctggggttggggtcccttgctgctcagggaggcagtactgactgggcactgcctctgcccccagcacccaccctcccccattccccagggagaaggggccccactgggcttggcctgcagtagtagggagacaagttccaggagcactttggggactggggttgcagaacacttcctgtctctggcttcatccttgggccagaaggctccaaccctcagcagcccttgccagatgtgccagggagtgggtgtggagacccggactccccccacccacgcacacctcggcctgatgagaggatggaggctggggcagagatgggcgtgacccagcgtcagagggtcgggggaggcattccttcctgtgtcccagagcttcactggtggagctggaggagccggaggtggagggtggggtctggcagctgctgctggggcagcctcatgaggggaggggaggggaggggaggggagcaggcactgggcgggggcctaggtgcactttgtccttgccaccaatggcgggaggagggtggacctgaacacctgcagggtgtggtgcctgccccagcctctcaggtacttggcccttggggagaagagaagagggtctggtttttgctgggggtgagtttccgggacactcccaaagcccacagataatccctggtgtgggaagaggagtcctggataccttgatgtttagcactttaaccccctttgtctttaaggtaggcgtgggggctactgccagaagtggctgttgggtctgaccccctcctttctgccctccctctgccacatgctggtccgcagagccctcctcccaaggggtggggccctgggtggagctcagcagggtctgcccactccctacgctggcccacataggcctccaggagccctcagtgagagggaccagcatagctgacccccagagtgtggtgggcgccggccctgcccgaggcccagtcggggccctttctgcagatctacctctggctcagcgcacgccccctgccctgagaacaggaaagggcccggaagggctgactcaccgggccgacgctcacacgaaaatgggatgcactttatttgctggtgcaaaggcaggtgagggtgcctcctgtgtgaccgttggccctcctgcctggtggcgctgaagggaaggagccagtgagcctgaccccgggaggggccgtccccgtgtgccgcgtttggcggggccccaggcggctcccccaggcccgggtctggggccccaggctttcccctgcctcgcggccgggcgtcccgtgctttgggtttcttggtttgggttttttaatgccagttctcagtacataagtgcattttgaaagaggttccagctatcacttgtaaccatatatatatacatatatattctatctacaaagtgtttatttgcgagatgtttcaacggtgagttcgggccccgcccgccttgtgaccatctgtccccggtcctcgtccccgccccgcgccctggtcccgagtggcgtggggacgggccatcactgtatgtattaaaatgactgtatcaaataaatgtttattgatttttttccagg

SEQ ID NO: 480 - DNA, 3170 bp, HOMO SAPIENS
gctaaccttgccgcgggccgagccctgcctcgccatggaccaggactatgagcggcgcctgcttcgccagatcgtcatccagaatgagaacacgatgccacgcgtcacagagatgcggcggaccctgacgcctgccagctccccagtgtcctcgcccagcaagcacggagaccgcttcatcccctccagagccggagccaactggagcgtgaacttccacaggattaacgagaatgagaagtctcccagtcagaaccggaaagccaaggacgccacctcagacaacggcaaagacggcctggcctactctgccctgctcaagaatgagctgctgggtgccggcatcgagaaggtgcaggacccgcagactgaggaccgcaggctgcagccctccacgcctgagaagaagggtctgttcacggtgacgcggctctgtgacctctcagtggaaggggactcagtgacctccgtgggctggtctgagcgggggaacctggtggcggtgggcacacacaagggcttcgtgcagatctgggacgcagccgcagggaagaagctgtccatgttggagggccacacggcacgcgtcggggcgctggcctggaatgctgagcagctgtcgtccgggagccgcgaccgcatgatcctgcagagggacatccgcaccccgccactgcagtcggagcggcggctgcagggccaccggcaggaggtgtgcgggctcaagtggtccacagaccaccagctcctcgcctcggggggcaacgacaacaagctgctggtctggaatcactcgagcctgagccccgtgcagcagtacacggagcacctggcggccgtgaaggccatcgcctggtccccacatcagcacgggctgctggcctcggggggcggcacagctgaccgctgtatccgcttctggaacacgctgacaggacaaccactgcagtgtatcgacacgggctcccaagtgtgcaatctggcctggtccaagcacgccaacgagctggtgagcacgcacggctactcacagaaccagatccttgtctggaagtacccctccctgacccaggtggccaagctgaccgggcactcctaccgcgtgctgtacctggcaatgtcccctgatggggaggccatcgtcactggtgctggagacgagaccctgaggttctggaacgtctttagcaaaacccgttcgacaaaggagtctgtgtctgtgctcaacctcttcaccaggatccggtaaacctgccgggcaggaccgtgccacaccagctgtccagagtcggaggaccccagctcctcagcttgcatggactctgccttcccagcgcttgtcccccgaggaaggcggctgggcgggcggggagctgggcctggaggatcctggagtctcattaaatgcctgattgtgaaccatgtccaccagtatctggggtgggcacgtggtcggggaccctcagcagcaggggctctgtctcccttcccaaagggcgagaaccacattggacggtcccggctcagaccgtctgtactcagagcgacggatgccccctgggaccctcactgcctccgtctgttcatcacctgcccaccggagccgcatgctcttcctggaactgcccacgtctgcacagaacagaccaccagacgccagggctgattggtgggggcctgagaccccggttgcccattcatggctgcaccccaccatgtcaaacccaagaccagccccaaggccagaccaaggcatgtaggcctgggcaggtggctcggggccactggcggagccagcctgtggatccaagagacagtccccacctgggcttcacggcatccttgcagccacctctgctgtcactgctcgaagcagcagtctctctggaagcatctgtgtcatggccatcgcccggcggtcagtgggcttcagatgggcctgtgcatcctggccaagcgtcaccctcacactggaggaggatgtctgctctggacttatcaccccaggagaactgaacccggacctgctcactgccctggctggagaggagcacaacagatgccacgtcttcgtgcattcgccaacacgtgccctcacagggccagcgtcctccttccctgcgcaagacttgcgtcccccatgcctgctgggtggctgggtcctgtggaggccagcagcggtgtggcccccgcccccaggctgcctgtgtcttcacctgtcctgtccaccagcgccaacagccgtggggaagccaaggagacccaaggggtccaggaggtgggcgccctccatccttcgagaagcttcccaggctcctctgcttctctgtctcatgctcccaggctgcacagcaggcagggagggaggcaaggcaggggagtggggcctgagctgagcactgccccctcacccccccaccaccccttcccatttcatcggtggggacgtggagagggtggggcgggctggggttggagggtcccacccaccaccctgctgtgcttgggaacccccactccccactccccacatcccaacatcctggtgtctgtccccagtggggttggcgtgcatgtgtacatatgtatttgtgacttttctttggatttgttttgtgtttttgttgactagtcctggaaatgtttgaggctagacggggaggggccaggacccacccactgctcctgggggatgaggtcctggttttaaagccccgtcatttcaagcgggtcgatcttccacattcactggagagactctccccacctctgtctgggtggggcgcggacccctcactgtgcgcctgtgcagggggtgctggtgcacgtggcagtgtggatttccagtggtcacggtcttactgtttcaaggtttttaaataagaaaaccaaccctgccttcgcccatgcccgcccctgcccgcagttgccaaagagccgccttgtcgctgtgggcgtcagggcttggctggctcagtgcacaacccacagtggccttcagaggctcctcctgggactgggaaccgccgcagggccaggcggacggcgtgaggtttgtgttggggctggttctgcccatgctagggggtgggggagctcccaggacagaccagccttgtttctcatgtaatgcagtgacgctgtcattaaacacgtggattcatgtgtgg

SEQ ID NO: 481 - DNA, 676 bp, HOMO SAPIENS
gctggggaggaacccaggctgggggagaagttaaagccagaggaggggcaggaatgtctgaggtggcaacacttctcttcagccagacagcactggccagtttggagtctgtccatcctgcaggccacaagctctggatgaggaacttgaggcaagtcaccagcccctgatcatttcgcctaaaagagcaaggactagagttcctgacctccaggccagtccctgatccctgacctaatgttatcgcggaatgatgtaaagaggctggagaggagctgggcccagggctcctcagagcaggaactccactatgcatctctgcagaggctgccagtgcccagcagtgagggacctgacctcaggggcagagacaagagaggcaccaaggaggatccaagagctgactatgcctgcattgctgagaacaaacccacctgagcaccccagacaccttcctcaacccaggcgggtggacagggtccccctgtggtccagccagtaaaaaccatggtccccccacttctgtgtctcagtcctctcagtccatctcgagcctccgttcaaattgatcatcatcaaaacttatgtggctttttgacctttgaatagggaattttttaaattttttaaaaattaaaataaaaaaaacacatggctcacccttccacccaaaaaa

SEQ ID NO: 482 - DNA, 2255 bp, HOMO SAPIENS
ggcactgcagcaccagccgtctgcagctccggccgccacttgcgcctctccagcctccgcaggcccaaccgccgccagcaccatggccagcaccatttccgcctacaaggagaagatgaaggagctgtcggtgctgtcgctcatctgctcctgcttctacacacagccgcaccccaataccgtctaccagtacggggacatggaggtgaagcagctggacaagcgggcctcaggccagagcttcgaggtcatcctcaagtccccttctgacctgtccccagagagccctatgctctcctccccacccaagaagaaggacacctccctggaggagctgcaaaagcggctggaggcagccgaggagcggaggaagacgcaggaggcgcaggtgctgaagcagctggcggagcggcgcgagcacgagcgcgaggtgctgcacaaggcgctggaggagaataacaacttcagccgccaggcggaggagaagctcaactacaagatggagctcagcaaggagatccgcgaggcacacctggccgcactgcgcgagcggctgcgcgagaaggagctgcacgcggccgaggtgcgcaggaacaaggagcagcgagaagagatgtcgggctaagggcccgggacgggcggcgcccatcctgcgacagaacacgttcgggttttggttttgtttcgttcacctctgtctagatgcaacttttgttcctcctcccccacccccgcccccagcttcatgcttctcttccgcactcagccgccctgccctgtcctcgtggtgagtcgctgaccacggcttcccctgcaggagccgccgggcgtgagacgcggtccctcggtgcagacaccaggccgggcgcggctgggtcccccgggggccctgtgagagaggtggcggtgaccgtggtaaacccagggcggtggcgtgggatcacgggtccttacgctgggctgtctggtcagcacgtgcaggtcagggcaggtcctctgagccggcgcccctggccagcaggcgaggctacagtacctgctgtctttccagggggaaggggctccccatgagggaggggcgacgggggaggggggtgatggtgcctgggagcctgcgtgtgcagccggtgcttgttgaactggcaggcgggtgggtgggggctgcagctttccttaatgtggttgcacaggggtcctctgagaccacctggcgtgaggtggacaccctgggccttcctggaagcctgcagttgggggcctgccctgagtctgctggggagtgggcattctctgccagggacccatgagcaggctgcatggtctagaggttgtgggcagcatggacagtcccccactcagaagtgcaagagttccaaagagcctctggcccaggcccctccccaccagggctttgcagatgtccttgaaagacccaccctagagccctttggagtgctggcccctcctgtgccctctgccctggtggaagcggcagccacaagtcctcctcagggagccccaagggggattttgtgggaccgctgcccacagatccaggtgttggaagggcagcgggtaaggttcccaagccagccccaacacccttcccacttggcacccagagggggctgtgggtggaggcctgactccaggcctctcctgcccacaccctctgggctgagttccttctttcccttggacgcccagtgctggccttggaggacggtcagctggaggatggcggtgggggaggctgtctttgtaccactgcagcatcccccacttctccacggaagccccatcccaaagctgctgcctggccccttgctgtaaagtgtgaagggggcggctgagttctcttaggacccagagccagggccctcaacttccatcctgcgggaggccttggccgggcactgccagtgtcttccagagtcacacccagggaccacgggaggatcctgacccctgcagggctcaggggtcagcagggacccactgccccatctccctctccccaccaagacagccccagaaggagcagccagctgggatgggaacccaaggctgtccacatctggcttttgtgggactcagaaagggaagcagaactgagggctgggatattcctcatggtggcagcgctcatagcgaaagcctactgtaatatgcacccatctcatccacgtagtaaagtgaacttaaaaattcaatcaaatgaacaattaaataaacacctgtgtgtttaagacatg

SEQ ID NO: 483 - DNA, 4521 bp, HOMO SAPIENS
cacgctcagagcagaccgctagcaggaggcaggatgtgatagtctaagaccctggaagctgacggccagagggagggaagggtggtcacagaggagaggcaaagcaacgggaggtggaggatcctggaggtgtctgcaaggagaatacacagcagcgaggggctgcagaagcggacccagcgacttctgcgctgacgcggggcgggcgggagagaggaagagaggggagcgcggtggcgctgcgagctggccccgccggggaaggggctgccatgtcccgtgagcggcccccgggcaccgacattccccgcaacctgagcttcatcgccgcgctaacggagcgcgcctactaccgtagccagcggcccagcctcgaggaggagccggaggaggagccaggcgagggcgggacgcggttcggggcccgatcccgcgctcacgcaccgagtcggggccgccgggcccgatctgcaccagccggaggcggcggggcccgggcgccccgcagccgtagcccagacacccgcaagagagtgcgtttcgccgacgcactggggttggagctggctgtcgtgcgccgcttccgtcccggtgagctgccccgggtgccccgccacgtgcagatccaattgcagagggacgccctccgccacttcgcgccctgccagccccgcgcccgcggcctccaggaggcgcgcgccgccctggagccggccagcgagcccggcttcgccgcccgcttgctgacgcagcgcatctgcctggaacgcgccgaggcgggcccgctgggcgtggccgggagcgcgcgcgtggtggacctggcctacgagaagcgcgtgagcgtgcgctggagcgccgacggctggcggagccaacgcgaggcgccagccgcctacgccggtccggccccgcccccgccgcgcgccgaccgcttcgccttccgcctgcccgcgccgccgattgggggcgccctgctcttcgccttgcgctaccgtgtgacaggtcacgagttctgggacaacaacggcggccgtgactatgctctacgtgggcccgagcacccgggcagtggcggagctccggagccgcagggctggatccactttatctgagacgaggcgcctgcggccgacggcggaaaacaccaaaggcacccgggggcggggcgacccgatgtggcggggaggagtaggagagaccaggattggcgggagcggtccaagggagtcaagccggggagggcgaaaagggaacctggccactgctccttggtccttggcattatgacgggattcccttgtcacctctgacagttcctggctgcggtgtccgcggactggctggggagtgatgacagaagggatggaaaccctattttcttttctccaagaccatggttggtctgcttccctcactcgggctccttgacagtcttctagaagagagaaggaggaaaagaagcagttcctgatgttacaaatgaacaaggatctcccagccttagtctttgagaaaagatggctgaaagagaggaactctccaagtcattccgcaaacaaatgcccatttaaacatcatccttgtcttgtgaagaaaacaggaagaatgtcatgtaccatgtggatcaccttcagttcaaagttgcagcaaagtgaagaaagaaactactggaagccacccagcaatgcactgtttagtcatcaattaggagcccatgggaggataatagggagactgggtggaggctcagtgtgtaataatctcttgtctaatgtatgtgtgtcactgccatgttgtatgaacaatagtgagggctcacatttacttaacacttgtgtgcgcaaatctgggtttttcttcctttccagaactatgactcgatcataaaatctgttttgtttgcatgcatgcccaaaacaaccctgtaagtagaacattgtcattatctctgttttagagatgaggaaacaggctcagagaagctcagaaatttgttcaagatcgcacagctagtaaatggcagaagtaggattgtgaacccagggaatctccagagcctctgtgtaaccatgatgttatattttttttcctctttaaaaacaaaatttaaaaccttgctataatctcttattaggaaatgatcatagtttctgactgtgctctgccttcccatcctgccaatctcctggactggcttggagaagacagggggcccccgagcttcatctgtgactcgaaggagtttgctgctgtctcctgtgtcagtgtcccatctatgcaggatcagcacaggacccccctcaccttcccacttacactctagcctttccatacattggaattctctcctggccctagccagcgctccacacctgttggtgtgccacctccctccctcttcccccactggccttgaacaggcaaaccccctaatgtcgccactaggttgggtccgtgactaggacacctgctagagggtctgtgcttgggccttttctaggaatcccgatgttactgggtaagtgccaactctgtgggcagaatgctaatgataatcctgttccctgacctctttctcagaagtaccctggctcactctccccaatctcagctttatagaacaacattttggtcttgattattcccatatcaagctgccccagggcttcggtaagctgttagttgccccactgcctcaaggctgggtctggctgagctacttcttaggcacacaaatagtgggtgtctccttggaacctgacacaaaactatcagtgctaccaagccttgtaaaatagggaggaaactaatatttcttgagtggcttctgagtgcctggtgctttcgcggctctctggagagattccttgccctgatggctttggtgtgtactcctctcccaggacttcagcactgagattttcccaaccccctggcttttcctcaccttgggttgagttgatccggcactaccacaaaccccaccatctgcaaaccaaccaagattaggcagtatgccctttccgtcttgcactgctcttccaaaacttccatctgtatttctcacaccctcagtaagcaaagctgagtgtgcatggacagagctgcatccactgctttctcccagcgggtgcagtctaatctgacacggggaacactaggagtttagcggaatcttcagccaccctattaatgtgttacgcattaggcattgtagtggaaactcctctgatggctcatgactatatgaacaggagcaatttggaatataacatgtcagctgtggactgggaagtgccgtgagagaaaacactacctgggtcataggcttgggtccctgaggcaacccagcagggacactgttgcccattcctctcatccagactgcaggtgtcttcctacacctccctgtcccatagcctccgtcctgttttttgtttgtttgtttttctttgtgaatgtagaaaaacatttcatcatgagccctagctcctcagttttccacctaacacccacattcccttgtttctaactgccgtgtttttctggagcctgctgggatctttgcagtttgcaggtcatagaatcagacatgaaaaggcttctcttccgacgtcattggttcctggctcctttacagatgagaacacaggtccagaggtgagaaatgactctagcagggtcatagaatttgttagtgcagctcaagatgggacttaaactcaggcctcctgatcacccattcccaggctaggaaacaggtctctgctcggtgtggtggttcatacctgtaatcgcaacactttgggaggctgaggcaggagcattgcttgagcccaggagttcgagaccagtctgagcaacatagtgggaccctgtctctacaaaaacttttaaaattagctgggcatggtggcacacatctgtattcccagctactcaggaagctgagacaggaggatcgcttgagcccaggagttggaggttactgagctatgatcgcaccactgcactccagcttggtgacagtgagaccctcaaaaaaaaaaagaaaagaaagaggtctctacacaagcccgtgattcttcatggcaagggataacatcagaaatgtttcattttctgctattagtttccattcctttccccatccaggcataaagagaaacaaaagacaatgatggtattctctgtgtcctcagctttggcacttttgttgatgttgctaaggagcagtgaccttgctaaaaagactgaataatccacccactgaatagctaacctggggaggaaatgaaaatttcctttgtggatctccccaaatccattgttgtcaccaggccctcccagaacctcctcagttccttcacagtgcaaccctgtgtacttggcccgcaacccaatagtattgtgcctcacttcaccttccatgggcaactgccctcccttctggacataaaacctcatattttaaataaagttgaaatatgaaaagaaagtatgtcataagataaaaaaaaa

SEQ ID NO: 484 - DNA, 2160 bp, HOMO SAPIENS
tgggcgggaggaacgcgccgctaggcgggagagcgcggccatggcggggccgggcgtccccggtgcccccgcagcgcgctggaaacgccacatcgtgcggcagctgcggcttcgggaccgtacgcaaaaggcgcttttcctggagctggtgccggcctataaccatctcttagagaaggctgagctgctggacaagttctcaaagaagctgcagccggagccaaacagtgtcactcccaccacccaccagggcccctgggaggagtcagagcttgactcagaccaagtcccatcactggtcgcactgagggtgaagtggcaggaggaggaggaggggctccggctggtctgtggtgagatggcctaccaggtggtggagaagggcgcggccctgggcacgctggagtcggagctgcagcagaggcaaagcaggctggcagccctggaggcccgcgtggcgcagctgcgagaggcgcgggcgcagcaggcccagcaggtggaggagtggcgggcgcagaatgcggtgcagcgggcagcctacgaggcgctgcgcgcgcacgtcgggctccgggaggcggcactgcgcaggctccaggaagaggcgcgcgacctgctggagaggctcgtgcagcgcaaggcgcgcgccgcggccgagcgcaacctgcgcaacgagcgccgggagcgggccaagcaggcgcgggtgtcccaggagctgaagaaggctgccaagcggaccgtgagcatcagcgagggcccggacaccctaggcgatgggatgagggagagaagggagactctggctctggcccctgagccagagcccctggagaaggaagcttgtgagaagtggaagaggcccttcaggtctgcctcagccacctccctgacgctgtcccactgtgtggatgtggtgaaggggcttctggattttaagaagaggagaggtcactcaattgggggagcccctgagcagcgataccagatcatccctgtgtgtgtggctgcccgacttcctacccgggctcaggatgtgctggatgcccacctctctgaggtcaatgctgttcgttttggccccaacagcagcctcctggccactggaggggctgaccgcctgatccacctctggaatgttgtgggaagtcgcctggaggccaaccagaccctggagggagctggtggcagcatcaccagtgtggactttgacccctcgggctaccaggttttagcagcaacttacaaccaggctgcccagctctggaaggtgggggaggcacagtccaaggagacactgtctggacacaaggataaggtgacagctgccaaattcaagctaacgaggcaccaggcagtgactgggagccgcgaccggacagtgaaggagtgggacctcggccgtgcctattgctccaggaccatcaatgtcctttcctactgtaatgacgtggtgtgtggggaccatatcatcattagtggccacaatgaccagaagatccggttctgggacagcagggggccccactgcacccaggtcatccctgtgcagggccgggtcacctccctgagcctcagccacgaccaactgcacctgctcagctgttcccgagacaacacactcaaggtcatcgacctgcgtgtcagcaacatccgccaggtgttcagggccgatggcttcaagtgtggttctgactggaccaaagctgtgttcagcccggacagaagctatgcactggcaggctcctgtgatggggccctttacatctgggatgtggacaccgggaaactggagagcagactacagggaccccattgcgctgccgtcaacgccgtggcctggtgctactccgggagccacatggtgagcgtggaccagggcaggaaggttgtgctctggcagtagggccacgacctgcctgcctgggctggagctcttgcccgaagcctgaagcttccttcggcgccatgcaggggttggggttgggactggagctggccttgggatttaatggggaagaaggcctggcaggacctggcctgtttgtttaaaaatgaagtatgggttgggggattacgctagtttttctttgtatttttatctctatctcctcactttttctcccaaagtagaaaaaaatgatatctgaaaaaaaaaaaaaaaaa

SEQ ID NO: 485 - DNA, 983 bp, HOMO SAPIENS
ggatgcagcagagaggagcagctggaagccgtggctgcgctctcttccctctgctgggcgtcctgttcttccagggtgtttatatcgtcttttccttggagattcgtgcagatgcccatgtccgaggttatgttggagaaaagatcaagttgaaatgcactttcaagtcaacttcagatgtcactgacaagcttactatagactggacatatcgccctcccagcagcagccacacagtatcaatatttcattatcagtctttccagtacccaaccacagcaggcacatttcgggatcggatttcctgggttggaaatgtatacaaaggggatgcatctataagtataagcaaccctaccataaaggacaatgggacattcagctgtgctgtgaagaatcccccagatgtgcaccataatattcccatgacagagctaacagtcacagaaaggggttttggcaccatgctttcctctgtggcccttctttccatccttgtctttgtgccctcagccgtggtggttgctctgctgctggtgagaatggggaggaaggctgctgggctgaagaagaggagcaggtctggctataagaagtcatctattgaggtttccgatgacactgatcaggaggaggaagaggcgtgtatggcgaggctttgtgtccgttgcgctgagtgcctggattcagactatgaagagacatattgatgaaagtctgtatgacacaagaagagtcacctaaagacaggaaacatcccattccactggcagctaaagcctgtcagagaaagtggagctggcctggaccatagcgatggacaatcctggagatcatcagtaaagactttaggaaccacttatttattgaataaatgttcttgttgtatttataaactgttcaggaagtctcataagagactcatgacttcccctttcaatgaattatgctgtaattgaatgaagaaattcttttcctgagca

SEQ ID NO: 486 - DNA, 8415 bp, HOMO SAPIENS
tcgttctcatttgggtgtctgcactgttggaagctactgcactgtgtttccacgcagacagagtacagtgggaaaggctttctccagctgatggatggctgttctctttatttggagtatcttactggttatgtaagcgacctcgagagaaattatcctgacccagatcggaggatgcagtagtgcttcagctgcaggatttcttagtcgttaacaccacagtgctgatgacaaagagcgagttgtaatcctcatcactgccagggctgagccagagcagacagaaaatcgtcatttgctcgttggagacttgttaggttacagctcctgcttcgttctgtggtcttggcttttcttcctatacaatgacgccgctgcaagtgagctcagaaatgcttggtttgagagccatttgcctgtgatttttgaagactaaagaagtatttacactagatactcttccagaacaaaatagaaatttcagcaaatacttactgacctttaaagccttgttgtggatttctgagatttaaagatactttaaaattctcaagaacaaagtccttattccttaaatggatacagagtgagagtatatagacaagactctgccacccagtggtttactggcataattactcatcatgatctcttcacccgcaccatgatcgttatgaatgatcaggtactagaaccacagaatgtcgatccttctatggttcaaatgacctttctagatgatgttgttcactctttgttaaaaggtgaaaatattggcattacatcacgacgcaggtctcgtgccaatcaaaacgtcaacgctgttcacagccattatacacgtgcccaagcaaatagtcccagaccagcaatgaactcccaagctgctgtaccaaaacagaatacacaccagcaacagcaacaaagaagtatccgtccaaataagaggaagggctcagatagcagtataccagatgaagagaagatgaaggaggaaaaatatgattatatatcacgaggagaaaatcctaaaggtaaaaacaaacacttgatgaataaaagaaggaaacctgaggaggatgaaaagaaactaaatatgaaaagacttcgaactgacaatgtttcagacttttctgagagcagtgactcagaaaattcaaataagagaataatagataattcctcagaacagaagccagagaatgaattgaaaaataaaaatacttcaaaaataaatggagaagaaggaaaaccccataataatgagaaggcaggagaagagaccctaaaaaatagccagcctccctgggatcaaatacaggaagataaaaaacatgaagaagcagagaagcggaagtctgttgacactcagcttcaagaagatatgattattcattcgtcagaacagtccacagtttctgatcataattctaatgatttacttcctcaggaatgcaatatggataaaacacataccatggaattgctaccaaaggagaagtttgtatccagaccacccacaccaaaatgtgttattgatattacaaatgacactaatttagaaaaggtggctcaggaaaactcaagtacctttggccttcagacacttcagaaaatggatcctaatgttagtgattcaaaacactctattgcaaatgcaaaattcttggaaacagcaaaaaaagattctgaccagagctgggtcagtgatgtagttaaagtggatctaacccaatcaagtgttacaaatgcttcttcaggaaatgatcacttgaacatggaaaaagagaagtatgtctcttacatttctcctttaagtgcagtttctgtcatggaagataagctgcataagcgaagtccacctccagagactataaaatctaaacttaatacttcagtagatactcacaagataaaatccagcccatcacctgaagttgttaaacccaaaataactcattctcctgattctgtaaagtctaaggccacttatgtgaacagccaagctactggtgaaagaagattggcaaataagatagaacatgagctatcaagatgcagttttcatccaattcctactcgaagcagtacattagaaactacaaagagtcctcttatcattgataaaaatgagcattttacagtttacagagatcctgcacttattgggtcagaaacaggagctaatcatatttcacctttcctaagccagcatccttttcctcttcactcctcatctcatagaacctgtttaaatccaggtacccatcatcctgccttaactcctgcaccccatttactagccggatcatctagtcaaactccattacctaccattaacactcatcctctgactagtggtccacaccatgctgttcatcaccctcatttacttcccactgtgttacctggagtgcctactgcctccttacttggtggccacccacgactagagagtgctcatgccagcagcttgagccacttagcgctagcacaccagcaacaacaacagttgttacagcaccagtcacctcatcttcttggacaagcccatccttctgcttcatataatcagcttggactttatccaattatttggcagtatccaaatggaacacatgcatactcaggacttggtttgccttcttctaagtgggttcacccagaaaatgcagttaatgctgaagcttcattaaggaggaattctcccagtccttggctacatcagcccacccctgtgacctcagcagatggtattggattacttagtcacattcctgtcagaccttccagtgcagagcctcatcggcctcttaaaattacagcccattccagtccaccattgacaaaaactttagtagatcatcataaggaagaattagaaagaaaagcttttatggaaccattacggtctgttgcatccacatcagccaaaaatgacctggatctaaataggtcacagactggaaaagattgtcacttacataggcattttgtggatccagtattaaatcagttacagaggccaccccaggagactggagagaggttaaacaaatacaaagaggaacaccgtcgaattcttcaagaaagtattgatgttgctccctttacaactaaaatcaagggacttgagggtgagagagagaattattccagagtggcatcatcatcttccagtcctaaaagccatatcatcaaacaagatatggatgtagaacgctcagtatcagatctttataaaatgaagcactcagtgcctcagagtttaccccaaagtaactatttcactacattgtctaatagtgtggtcaatgaaccaccaagatcatacccatccaaagaagtttcaaatatttacggtgataaacagagtaatgcccttgcagcggcagcagctaatcctcaaactctgacttcatttataacatctctttcaaagcctccacctttgattaaacaccaaccagaaagtgaaggtttagtaggcaagataccagaacatcttccacatcagattgcatctcactcagtaacaaccttcagaaatgattgtaggagtcctacccatttgacagtttcttctacaaatacactccgcagtatgcctgcattacatagagcaccagtatttcacccaccaatccatcacagcctggaaagaaaggaaggcagctatagtagtctttcccctccaactttaactccggtgatgccagtaaatgctggtggtaaagttcaagaatcacagaagcctccaactctaatacccgaaccaaaagactcccaggcaaattttaagagttcttcagaacagagtttgacggagatgtggagacctaataataacctcagcaaagagaaaactgaatggcatgtggagaaaagcagcggaaagttacaggctgctatggcatctgtcattgtgcgtccatcttctagtacaaaaactgatagtatgccagcaatgcagttagcttctaaagatcgagttagtgaaagatcttcagctggggcacataaaacagattgcctcaaactagcagaagccggagaaactggaagaatcattttgccaaatgtgaattcagacagtgttcacacaaaatctgaaaaaaactttcaggctgtctcacagggcagtgttcccagttcagtcatgtctgctgtaaatacgatgtgtaataccaaaacggatgtaatcacatctgctgccgatactaccagtgtttccagctggggtggttcagaagtaatttcctctttatcaaataccattttggcctctacatcatcagaatgtgtatcttcaaaaagtgtcagtcagccagtggctcaaaaacaagaatgcaaggtcagcaccacagcaccagttacattagccagtagtaagacaggaagtgttgttcaacccagttctgggttctcaggcacaactgattttatccatttaaaaaagcacaaggcagcattggctgcagctcagtataaaagtagtaatgccagtgagactgaacctaatgctataaaaaatcagacactttcagcctcccttcctctggatagcactgtaatctgtagtacaattaacaaagcaaactctgtaggaaatgggcaagcttcccagacaagtcaaccaaactaccatactaaactgaaaaaggcctggctcaccagacactcagaagaagataaaaatactaataaaatggaaaattcagggaattctgtatcagaaattattaagccatgttctgtcaacttaatagcctctacatctagtgatatacaaaatagtgtagatagtaagatcatagttgataaatatgtaaaagatgataaagtcaacaggagaaaagccaaaagaacttatgaatctggctctgaaagtggagactcagatgaaagtgaaagcaagtcagagcaaaggactaaaagacaacctaagccaacttacaaaaagaagcaaaatgatttgcaaaagagaaaaggtgaaatagaagaagatttgaaacccaatggagttctcagcaggagtgccaaagaaagaagtaaactgaagttgcaaagcaacagtaatactggcattcctcgttcagtattgaaagattggcgtaaagtcaagaagctgaagcaaactggggaatcctttttacaggatgactcctgctgtgagatagggcctaatttacaaaagtgtcgagaatgtagacttattcgcagtaaaaaaggagaagaaccagctcactcaccagtattttgtagattttactactttagacggttgtcatttagtaaaaacggagtagttagaatagatggtttctcttctcctgaccaatatgatgatgaagctatgagtttgtggacacatgaaaattttgaagatgatgaactagatatagagacttctaaatatatcttggatataataggtgataagttctgtcaattagtaacatctgaaaaaacagctttgtcctgggtgaaaaaggatgccaaaattgcctggaaaagagcagtgagaggagtccgggagatgtgtgatgcatgtgaagcaacattgtttaacattcactgggtctgccaaaaatgtggatttgtggtctgcttagattgttacaaggcaaaggaaaggaagagttctagagataaagaactatatgcttggatgaagtgtgtgaagggacagcctcatgatcacaaacatttaatgccaacccaaattatacctggttctgttttgacagatcttctagatgccatgcacactcttagggaaaaatatggtattaaatcccattgtcattgtactaacaaacagaatttacaagttggaaattttcctacaatgaatggtgtatctcaatctcagcagcaaaatactcctccgaagtctgagaaaaatggtggcagcagcccagagagtgatgtaggcacagataacaagttaactcctccagaatcccagtcaccactgcactggttagcagatcttgcagagcaaaaagccagagaggaaaaaaaagaaaacaaagaacttacccttgaaaaccaaattaaagaagaaagagaacaagacaactctgaatctccaaatggcagaacatcacctcttgtgtcccagaataatgaacaaggctcaaccttacgggatttgctgactacaacagctggaaagctacgtgtggggtctacagatgctggcattgcctttgccccagtatattcaatgggagccccaagtagcaaaagtggacggactatgcctaacattcttgatgacataattgcttcagttgttgaaaacaaaattccaccaagtaaaacctccaagataaatgtaaaaccagagcttaaagaagagcctgaagaaagcataatatctgcagtggatgaaaataataaattatacagtgatataccacattcttggatctgtgagaagcatattttatggcttaaggattataagaatagcagtaattggaagcttttcaaagaatgttggaaacaaggacagcctgcagtggtttctggtgtgcataagaaaatgaacattagcctatggaaggcggaatcaattagtcttgattttggagaccaccaagctgatctcctgaactgcaaagatagcatcatttcaaatgccaatgttaaggaattctgggatggttttgaagaagtttcaaaacggcagaaaaacaagagtggagaaacagttgttttaaaattgaaagactggccttcaggagaagacttcaagactatgatgccagcaagatacgaagatcttttaaaaagtctgccattgccagaatattgtaatccagaaggaaaattcaatttggcctctcatttgccaggattttttgtacgtcctgatctaggacccaggttgtgcagtgcctatggtgtagttgctgctaaagatcatgatataggaacaacaaatctccatattgaagtttctgatgttgtaaatatactagtttatgttggcatagcaaaaggaaatggcattctctcaaaagcaggaattctcaagaaatttgaggaagaagatttggatgacattttaaggaaaagattgaaggactcaagtgaaatacctggtgctctgtggcatatttatgctgggaaagatgttgacaagataagggaatttcttcaaaagatttcaaaagaacaaggccttgaagttctaccagaacatgatccaatacgtgaccaaagttggtatgtgaacaaaaagctccgtcaaaggctgcttgaagaatatggagtcagaacctgtactcttattcagttccttggtgatgctattgttttgccagcgggagcacttcatcaggttcagaattttcacagctgtattcaggtaactgaagattttgtgtctccagaacatcttgtagagtcatttcatttaacacaggaactgagacttttgaaggaagaaatcaattatgatgataaactacaggttaaaaatattttgtatcatgcagtcaaagaaatggtgagagccttgaagatacacgaggatgaagtagaggatatggaagaaaattaagtgtgatccagtttgatatttttaggttgttgaactgggattacttaaccttgaatgatgatatgtatgcacactgactttaagcttcataaaaccatcagtgccaagaaattctctttgtagtaattacttgttactgacaccacagcagtatagcatatgtcacagctcctgtgattcaatgttataaaacaagcagaattttaaaagcagcactatatagctgttttgtattatagtgtatatgatgtttgtgaaaatgccagatttaaaatgatgtatttatttttggtaaaaaataaaaaattctatgctatattgttgatcaagtgtaaatgtgaccttgtacagtttactaaaattactgatatttttcactacattgagacagttactgtgagaataggacacaaacaccagctattgcctgcatctgggaaattgctgaatcgcacagcagtcatgtcataatcagaaaattactgccaaataattgtaaaatttgtaaagtataaagtatataaagtagatactaaatacagacacttcaatattttgttgaagctattgactgtacaattaaacattttcaaaaggtgtaatttatttaaaattgtctcattttggtaaaatttatgtgaacttttaaagctaaatattaaacttaatatgctatgtaaatatatacatatatacatttaatgatgtatttttttaaaacattggcttgcttttgttaaagtgcaagtgttacatatggctttgtacattaaagttgaaaggggttttacattttccattaaaaggactttatcaaaaaaaaaaaaaaaaaaaaaaaa

SEQ ID NO: 487 - DNA, 3570 bp, HOMO SAPIENS
gcggccgcgggcgcgggcgggcgcgcgggggagcccggccgagggatgggctgcgcccccagcatccatgtctcgcagagcggcgtgatctactgccgggactcggacgagtccagctcgccccgccagaccaccagcgtgtcgcagggcccggcggcacccctgcccggcctcttcgtccagaccgacgccgccgacgccatccccccgagccgcgcgtcgggaccccccagcgtagcccgcgtccgcagggcccgcaccgagctgggcagcggtagcagcgcgggttccgcagcccccgccgcgaccaccagcaggggccggaggcgccactgctgcagcagcgccgaggccgagactcagacctgctacaccagcgtgaagcaggtgtcttctgcggaggtgcgcatcgggcccatgagactgacgcaggaccctattcaggttttgctgatctttgcaaaggaagatagtcagagcgatggcttctggtgggcctgcgacagagctggttatagatgcaatattgctcggactccagagtcagcccttgaatgctttcttgataagcatcatgaaattattgtaattgatcatagacaaactcagaacttcgatgcagaagcagtgtgcaggtcgatccgggccacaaatccctccgagcacacggtgatcctcgcagtggtttcgcgagtatcggatgaccatgaagaggcgtcagtccttcctcttctccacgcaggcttcaacaggagatttatggagaatagcagcataattgcttgctataatgaactgattcaaatagaacatggggaagttcgctcccagttcaaattacgggcctgtaattcagtgtttacagcattagatcactgtcatgaagccatagaaataacaagcgatgaccacgtgattcagtatgtcaacccagccttcgaaaggatgatgggctaccacaaaggtgagctcctgggaaaagaactcgctgatctgcccaaaagcgataagaaccgggcagaccttctcgacaccatcaatacatgcatcaagaagggaaaggagtggcagggggtttactatgccagacggaaatccggggacagcatccaacagcacgtgaagatcaccccagtgattggccaaggagggaaaattaggcattttgtctcgctcaagaaactgtgttgtaccactgacaataataagcagattcacaagattcatcgtgattcaggagacaattctcagacagagcctcattcattcagatataagaacaggaggaaagagtccattgacgtgaaatcgatatcatctcgaggcagtgatgcaccaagcctgcagaatcgtcgctatccgtccatggcgaggatccactccatgaccatcgaggctcccatcacaaaggttataaatataatcaatgcagcccaagaaaacagcccagtcacagtagcggaagccttggacagagttctagagattttacggaccacagaactgtactcccctcagctgggtaccaaagatgaagatcctcacaccagtgatcttgttggaggcctgatgactgacggcttgagaagactgtcaggaaacgagtatgtgtttactaagaatgtgcaccagagtcacagtcaccttgcaatgccaataaccatcaatgatgttcccccttgtatctctcaattacttgataatgaggagagttgggacttcaacatctttgaattggaagccattacgcataaaaggccattggtttatctgggcttaaaggtcttctctcggtttggagtatgtgagtttttaaactgttctgaaaccactcttcgggcctggttccaagtgatcgaagccaactaccactcttccaatgcctaccacaactccacccatgctgccgacgtcctgcacgccaccgctttctttcttggaaaggaaagagtaaagggaagcctcgatcagttggatgaggtggcagccctcattgctgccacagtccatgacgtggatcacccgggaaggaccaactctttcctctgcaatgcaggcagtgagcttgctgtgctctacaatgacactgctgttctggagagtcaccacaccgccctggccttccagctcacggtcaaggacaccaaatgcaacattttcaagaatattgacaggaaccattatcgaacgctgcgccaggctattattgacatggttttggcaacagagatgacaaaacactttgaacatgtgaataagtttgtgaacagcatcaacaagccaatggcagctgagattgaaggcagcgactgtgaatgcaaccctgctgggaagaacttccctgaaaaccaaatcctgatcaaacgcatgatgattaagtgtgctgacgtggccaacccatgccgccccttggacctgtgcattgaatgggctgggaggatctctgaggagtattttgcacagactgatgaagagaagagacagggactacctgtggtgatgccagtgtttgaccggaatacctgtagcatccccaagtctcagatctctttcattgactacttcataacagacatgtttgatgcttgggatgcctttgcacatctgccagccctgatgcaacatttggctgacaactacaaacactggaagacactagatgacctaaagtgcaaaagtttgaggcttccatctgacagctaaagccaagccacagagggggcctcttgaccgacaaaggacactgtgaatcacagtagcgtaaacgagaggccttcctttctaatgacaatgacaggtattggtgaaggagctaatgtttaatatttgaccttgaatcattcaagtccccaaatttcattcttagaaagttatgttccatgaagaaaaatatatgttcttttgaatacttaatgacagaacaaatacttggcaaactcctttgctctgctgtcatcctgtgtacccttgtcaatccatggagctggttcactgtaactagcaggccacaggaagcaaagccttggtgcctgtgagctcatctcccaggatggtgactaagtagcttagctagtgatcagctcatcctttaccataaaagtcatcattgctgtttagcttgactgttttcctcaagaacatcgatctgaaggattcataaggagcttatctgaacagatttatctaagaaaaaaaaaaaacgacataaaataagtgaaacaactaggaccaaattacagataaactagttagcttcacagcctctatggctacatggttcttctggccgatggtatgacacctaagttagaacacagccttggctggtgggtgccctctctagactggtatcagcagcctgtgtaacccctttcctgtaaaaggggttcatcttaacaaagtcatccatgatgagggaaaaagtggcatttcatttttggggaatccatgagcttcctttatttctggctcacagaggcagccacgaggcactacaccaagtattatataaaagccattaaatttgaatgcccttggacaagcttttcttaaaaaaaaaaaaaaaaaaaa

SEQ ID NO: 488 - DNA, 6642 bp, HOMO SAPIENS
gccgggcggcccggcaagcggcgctgcggggtaggctgctttcctgaggccggactcaacgggtctcggctgagccaccgggtgagctcaccgcccagcccaaaccaggagattgcgagggagcgatgcggtgcagcgcgtgttcttggggaagatcccgactaagccattttccagtggcacctcttccatcatgagttcctgaggcagtccgatggggctactttattccagaacaatcacaatttgcttgtaaatgcatcacgaagaggcagcccagaatgaagaaagcaagcaggagtgttggctcagtgcctaaagtgtctgcaataagtaaaacgcaaacagcagaaaaaattaaacctgaaaacagctcttcagcatctacgggaggcaaacttgtaaaacctggaacagcagcatcattgtcaaagaccaagagcagtgatgaccttttagctggaatggccggaggggtaacggtgactaatggtgttaaaggaaagaaaagcacctgcccatctgcagcaccttcagcatctgcccctgccatgaccaccgtggagaacaaatccaagattagcacaggcacagcttcttcaaccaagcggagcacttctacaggtaataaagaatccagttctactagagaaagattacgtgaacgtacccgattaaaccagagcaaaaaactaccttctgcaggtcagggagctaatgacatggcattggccaaacgttcccgcagtcgaactgctacagaatgtgacgttcgtatgagcaagtctaagtcagacaatcagatcagtgacagagctgctttggaggccaaagtgaaggatcttctcacactggcaaaaaccaaagacgtagaaattttacatttgagaaatgaactgcgagacatgcgtgcccagctgggcattaatgaggatcattctgagggtgatgaaaaatctgagaaggaaactattatggctcaccagccgactgatgtggagtccactttattgcagttgcaggaacagaatactgccatccgtgaagaactcaaccagctgaaaaatgaaaacagaatgttaaaggacaggttgaatgcattgggcttttccctagagcagaggttagacaattctgaaaaactgtttggctatcagtccctgagcccagaaatcacccctggtaaccagagcgatggaggaggaactctgacttcttcagtggaaggctctgcccctggctcagtggaggatctcttgagtcaggatgaaaatacactaatggaccatcagcacagtaactccatggacaatttagacagtgagtgcagtgaggtctaccagcccctcacatcgagcgatgatgcgctggatgcaccatcctcctcagagtcggaaggcatccccagcatagagcgctcccggaaggggagcagcgggaatgccagtgaagtgtccgtggcttgcctgactgaacggatacaccagatggaagagaaccaacacagtacaagtgaggaactccaggcaaccctgcaagagctagctgatttacagcagattacccaggaactgaatagtgaaaacgaaaggcttggagaagagaaggttattctgatggagtctttatgtcagcagagcgataagttggaacactttagtcgacagattgaatacttccgctctcttctagatgagcatcacatttcttatgtcatagatgaagatgtaaaaagtgggcgctatatggaattagagcaacgttacatggacctcgctgagaatgcccgttttgaacgggagcagcttcttggtgtccagcagcatttaagcaatactttgaaaatggcagaacaagacaataaggaagctcaagaaatgataggggcactcaaagaacgcagtcaccatatggagcgaattattgagtctgagcagaaaggaaaagcagccttggcagccacgttagaggaatacaaagccacagtggccagtgaccagatagagatgaatcgcctgaaggctcagctggagaatgaaaagcagaaagtggcagagctgtattctatccataactctggagacaaatctgatattcaggacctcctggagagtgtcaggctggacaaagaaaaagcagagactttggctagtagcttgcaggaagatctggctcatacccgaaatgatgccaatcgattacaggatgccattgctaaggtagaggatgaataccgagccttccaagaagaagctaagaaacaaattgaagatttgaatatgacgttagaaaaattaagatcagacctggatgaaaaagaaacagaaaggagtgacatgaaagaaaccatctttgaacttgaagatgaagtagaacaacatcgtgctgtgaaacttcatgacaacctcattatttctgatctagagaatacagttaaaaaactccaggaccaaaagcacgacatggaaagagaaataaagacactccacagaagacttcgggaagaatctgcggaatggcggcagtttcaggctgatctccagactgcagtagtcattgcaaatgacattaaatctgaagcccaagaggagattggtgatctaaagcgccggttacatgaggctcaagaaaaaaatgagaaactcacaaaagaattggaggaaataaagtcacgcaagcaagaggaggagcgaggccgggtatacaattacatgaatgccgttgagagagatttggcagccttaaggcagggaatgggactgagtagaaggtcctcgacttcctcagagccaactcctacagtaaaaaccctcatcaagtcctttgacagtgcatctcaagtaccaaaccctgctgcagctgcaattcctcgaacgcccctgagcccaagtcctatgaaaacccctcctgcagcagctgtgtcccctatgcagagacattccataagtggaccaatctcaacatccaaacccctgacagccctgtcagataagagaccaaactatggggaaatccctgttcaagagcatctgttaagaacatcttcagccagccggcctgcttccctgccaagagtgcctgcgatggaaagtgccaagaccctctcagtgtctcgacgaagtagtgaagaaatgaaacgggacatttctgcacaggagggagcgtcgccagcctctctgatggctatgggaaccacgtctccacagctttccctgtcctcttctccaacggcatctgtgactcccaccacccgaagccgaataagagaagaaaggaaagaccctctctcagcattggccagagaatatggaggatcaaagaggaacgccttgctgaagtggtgtcagaagaaaacagaaggctatcagaatattgacattacaaacttcagcagcagctggaatgatgggctggccttctgtgccctcctgcatacatatctccctgcccacattccatatcaagaactgaacagccaggataagagaaggaacttcatgctggctttccaggcagctgaaagtgtcggcatcaaatccacactggacattaatgaaatggtacggactgaacgacccgactggcagaacgtgatgctgtatgtgacggcgatctacaagtactttgagacctgagcatgccgggaggagccgccccaatagcgggggtacccctccacagcgaccgagcgacaccgacgccattagctacgcacccctgtaaagcttccagcaactctgggctgccccacagcgtgtgagcctccagctcggggcttccgtattggaagaactcagccgtgtggcccacagctcccaccagggcccctcccacatgacccgtccattcaggtcatgtgggctcagcacacatcctgcaggccggtggctgctggagttttccttctgaagagaatattgaactacactagtgctccagggcaccaaacaaaaagggctcatgcacagctgaatttgggaaaagggattcagttctgtgggaaactcactagggttgatgaaggctcggccgcggcacttcctgactattggctggggtgggttccggtgctggtgagaacccagaaggagagtcagcgcctggcagttcccagcgccctgggcccttcaccgtcctagtttggaggagcatgttcaccacagacgtgggtcagctgccccacacctgacggggctgtcccggccgacacaatccaggcgtgttcagcctgagctaggagagtatctagagggcgtggtgcgggcacgccagggctggggtgctgctgctgcactcacgcggctgggctttctggcgggaagcagttacgggggccccttgcctggactcagcgacctgtcttccagcctggaaggggtttggagtcccagctctggctttagatttcttcatcataaggagtttttctagttaacatttttgttttgttacgagcaatgctggaaaaggtcgctcctgttctgttagtaccaaagttacattgtttcaataagcatagaaatctaaacaacatctgtacattagcatggtgagagcaaggaataaagcaggaaataggagaaaagtaaacaactttagggagcccaggcagtgtcatttaaactcactgagtcactaagacataattctcctaggccagagttaaagaaagtgccttaactcttcttgtgagggcagccactgccctccgtggccaaggcaggacctccaagactcagtggttgagttgtctcctaccaccatgcccgccctccccaggtactgggtccatgccccctgtgcccaccctccccaggtgctgggtccatgctgtttgaaccaaagccttatttaaaggtggtcactggagatgctctcaggccagaactcaacagctatttttgggaatagggatctcccgtgtgcctaacgcagtagctattggtttgaacaatgtccagacaagacctgtacctttgagaatataactgtgtttggcacctgcatagcaccatgaggaagaccagccaccagtggaagcggggtcactgccccacagactggatgcaatgaggggctcacaggaggcccagccagcccgattgtgggctgaggggtctgcattcaagcacgatgttctagaataggagtttaacgtgtctacgtaacctagaatgtggttattaggaaaggggctgtgcatgtgggtgcagctggcggcacacctggtcaccagatggccagaagctgcccatcagccctgcccagatgtcagcctgggagctcaggctgctgccgctggctggatgccctttggtgaaatgcctgttttcagctaagaaaggagaggccaggcaagcaaagtcatgccacaaagcatatcagagacccccgcagactcctggccccgtcccgccccctgtctgagttgtgtttttgttgctgttcctctgttgatggccagctctgctgttggcatgagccactgatgttcatgtgagaattactgtttttaagtgtctctccacttaggtgtcctcagttcccacttttgctctcatttgccttcacagaggccactccacctgtccggatccagctgtctggtcatggtttggtttatttattttgtccttcaggggctgttttgccctaagaatgagggggcttcccctggtctgcagttcccaactttatcccttgctggccatgcgagcccagccctggtgcctcatgggatgggggggtaggggtccccaggatcttctggaggaaggtggccatggatggatgggctgtatctgtgttttccctctgggagtctcatgggtccagcatcaggcctgaggtcagcaacagggaaagagggtgggcacggggagggcttggccccgcctatctagaggcttgcctcgggcccctccttggggaaggtttgcgtgcagagctgcaagggagagggttccagaagcattgccttttgcctcgtctaataggatccttaggacactgtgggctttaggaatgactatagatgctcacacgtgtttaaagtgacatttggagatgctctcagtcctgtggcatctggcacgaagtctccaagaagccactttgcctcttctcccttcaagcacaagctttactgcaaaagggccagtcgcgtttctatttctctcgatcccaggcttctgcggaccgacgatacgtttaaatgttgttctagtaaatattcttgaatgtattaaaatggctgaaacaacaagcttgggcttttctagcttgccctccactccctgccgtccctctgacatcctgaccaggagtccagggtggcctcccctgggccacagcacatcaccgtgtggcctggggctgtgggacagtgagccctgtaaccactagggttctgtgacagatgccaagaccccagagaccgtggcagagctacccccaggagagcggaagcccctacacagcccagacacatgccttccctgggggctggggagtgtgtctcgaggggttttgtttgttttgaggcatgtatcatcttggaaataattgtcaggatgtataaaatagagaaaaagaaaaaaggtatcctacccagaggcaaccagataaacttttttgcctgtg

SEQ ID NO: 489 - DNA, 2212 bp, HOMO SAPIENS
agccggatctcagtcagtatagaactaggttaccgcacacgttggcgggggtgggagggtgtgagactggcctccacaccacgaaagatccatcccggaagtgcttactggtcgtctccatgcgccggttcctgggcgtcttagagccaaggcgcgaggctcggagtgagaggtagagctggaggggaccctaagcgccctccgcccgggacgtgagccgctgcgcccaccgggctagacccggcgccatcatgctgcttctgccaagcgccgcggacggccggggcaccgccatcacccacgctctgacctctgcctctacactctgtcaagttgaacctgtgggaagatggtttgaagcttttgttaagaggagaaacagaaatgcttctgcctcttttcaggaactggaggataagaaagagttatccgaggaatcagaagatgaagaattgcagttggaagagtttcccatgctgaaaacacttgatcccaaagactggaagaaccaagatcattatgcagttcttggacttggccatgtgagatacaaggctacacagagacagatcaaagcagctcataaagcaatggttttaaaacatcacccagacaaacggaaagcagctggtgaaccaataaaagaaggagataatgactacttcacttgcataactaaagcttatgaaatgttatctgatccagtgaaaagacgagcatttaacagtgtagatcctacttttgataactcagttccttctaaaagtgaagcaaaggataatttcttcgaagtgtttaccccagtgtttgaaaggaattccagatggtcaaataaaaaaaatgttcctaaacttggtgatatgaattcatcatttgaagatgtagatatattttattctttctggtataattttgattcttggagagaattttcttatttagatgaagaagaaaaagaaaaagcagaatgtcgtgatgagaggagatggattgaaaagcagaacagagcaacaagagcacaaagaaaaaaagaagaaatgaacagaataagaacattagttgacaatgcatacagctgtgatccaaggataaaaaagttcaaggaagaagaaaaagccaagaaagaagcagaaaagaaagcaaaagcagaagctaaacggaaggagcaagaagctaaagaaaaacaaagacaagctgaattagaagctgctcggttagctaaggagaaagaagaggaggaagtcagacagcaagcattgctggcaaagaaggaaaaagatatccagaaaaaagccattaagaaggaaaggcaaaaacttcgaaactcatgcaagacctggaatcatttttctgataatgaggcagagcgggttaaaatgatggaagaagtggaaaaactttgtgatcggcttgaactggcaagcttacagtgcttgaatgaaacactcacatcatgcacaaaagaagtaggaaaggctgctttggaaaaacagatagaagaaataaatgagcaaatcagaaaagagaaagaggaagctgaggctcgtatgcgacaagcatctaagaacacagagaaatcaactggtggaggtggaaatggaagtaaaaattggtcagaagatgatctacaattactaattaaagctgtgaatctgttccctgctggaacaaattcaagatgggaagttattgctaattacatgaacatacattcttcctctggagtcaaaagaactgccaaagatgttattggcaaagcaaagagtctccaaaaacttgaccctcatcaaaaagatgacataaataaaaaggcatttgataagttcaaaaaagaacatggagtggtacctcaagcagacaacgcaacgccttcagaacgatttgaaggtccatatacagacttcaccccttggacaacagaagaacagaagcttttggaacaagctttgaaaacatacccagtaaatacacctgaaagatgggaaaaaatagcagaagcggtgcctggcaggacaaagaaggactgcatgaaacgatacaaggaacttgtcgagatggtaaaagcaaagaaagctgctcaagaacaagtgctgaatgcaagtagagccaagaaatgacaatctttgttgtgtgtgcatttttataataaaactgaaaatactgtaaacattttcattcttaaaattatactcatggtaataatttgaaagta

SEQ ID NO: 490 - DNA, 7247 bp, HOMO SAPIENS
ggctccgcccacccagcccgcggcttggcccaggcggtagttcgcgttttgagccgatcgtgccaccatagctcctgctgctgcctctaccgctgcggctaccgcggcggagctgaaattgccgaacgcgatgcccgagggcgctgtgagcggggtggccttagctcgccgaggctggtcagtgagagggcatactgggaagccctctggagtgggaagacagtgccgctgttgagacaagacccaggactgggccggggactgtcccaaagggtttctcgtcataatggctgtggaagggtcaaccattaccagccggatcaagaatctgttgagatctccatccatcaaactgcgcaggagtaaggcaggaaaccgacgagaggacctcagctccaaggtgaccttggagaaggtgctgggaattacagtgtctggaggcagaggacttgcctgtgacccccgatcaggtttagttgcttacccagcagggtgtgtggttgtgttgttcaatccccggaaacacaaacagcaccacatcctcaacagttccaggaaaaccatcactgcccttgccttctcccctgatggcaagtacttggtcactggagagagtgggcacatgcctgccgtgcgggtttgggacgtggcagagcacagccaggtggccgagctgcaggagcacaagtatggtgtggcttgtgtggccttctctcctagcgccaagtacattgtctctgtgggctaccagcatgacatgatcgtcaacgtgtgggcctggaagaaaaacattgtggtggcctccaacaaggtgtccagtcgggtgacagcagtgtccttctctgaggattgcagctactttgtcactgcaggcaaccgacacatcaaattctggtatctcgatgacagcaagacctcaaaggtgaatgccactgtgcccttgctgggccgctcagggctgctgggagagctacggaacaacctattcactgatgtggcctgtggcagaggaaaaaaggcggacagtaccttctgcatcacgtcctcagggctgctgtgcgagttcagtgatcgaaggcttttggacaagtgggtggagctgaggaccacagtggcccactgcatctctgtgagccaagactacatcttctgtggctgtgctgatggcaccgtgcgccttttcaacccctctaacctgcacttccttagcaccttgccccgaccccatgctctggggacagacattgctagcgtcaccgaggccagtcgcctcttctctggagtggcgaatgccaggtatccagacaccattgccttgacctttgatcctactaatcagtggctgtcttgtgtgtacaacgatcatagcatttatgtttgggatgtgagggaccccaagaaagtgggcaaggtgtactcggctctgtatcattcttcctgcgtctggagtgtggaggtctaccccgaggtgaaggatagtaaccaggcctgcctgccccccagttcctttattacctgctcctcagacaacaccatccgcctgtggaacacagagagctccggggtgcatggctccaccctccaccgaaacatcctcagcagtgacctcattaaaatcatctatgtggatgggaacacccaggccctgctggacacagagctgcctggaggagacaaagctgatgcatccctgttggatccccgcgtgggcatccgctcggtgtgtgtcagccccaatggacagcatctagcatcaggggaccgtatgggcacacttagggtgcacgaacttcagtccctgagtgagatgctgaaggtggaggcccatgactctgagattctgtgcctggagtattctaagccagacacaggtctgaaactgctagcatcggcgagccgggaccggctgatccatgtgctggatgccgggcgggagtacagcctacagcagacgctggacgaacactcatcctccatcactgctgttaagtttgcagccagtgatgggcaagtccgcatgatcagctgtggagcagacaagagcatctacttccgcactgcgcagaagtctggagatggagtgcagttcacacggacacaccacgtggtgcggaagacgaccctctatgacatggatgtggagcccagctggaagtacacggctatcggctgccaggaccgaaatattcggatatttaacatcagcagtggaaagcagaagaagctgtttaaagggtcacagggtgaggacggcacactcattaaggtgcagacagacccctcagggatctacattgccaccagctgttctgacaagaatctctccatttttgacttctcctcaggcgagtgcgtggccaccatgtttggccactcagagattgtcactggcatgaaatttagtaatgattgtaaacatctcatctctgtgtctggggacagctgcatatttgtgtggcgcctgagctctgagatgaccatcagcatgaggcagcgtctggccgagttgcgccagcgtcagcggggcggcaagcagcaaggaccatcctctccccaaagggcttctggacccaaccggcaccaggccccatcaatgctgtctcctggaccggctctctcatcagacagtgacaaggagggagaagatgaggggactgaagaagaacttccagcactgcccgtccttgccaagagtaccaagaaggcactggcctcggtccccagcccagctttgccccgaagcctgtcccactgggagatgagtcgggcacaggagtccgtggggttcctggacccagctcctgcagccaacccaggacccagaagaagagggcgctgggttcagccaggtgtggaactgagcgttagatccatgctggatctgcggcagctggaaacactggccccaagcctgcaggaccctagccaggactcgctggccatcatcccatctggtcccaggaagcatgggcaggaggcccttgagacttcactcactagccagaatgaaaagccccctcggcctcaggcttcccaaccttgttcctatccccatattatccgattattgtcacaagaggaaggggtctttgcccaagatctggaacctgcacccattgaagatggtattgtctacccggagccgagtgacaaccccaccatggataccagtgagttccaagtgcaggctccagcccggggaactctgggaagagtgtacccaggcagcaggagctcagaaaagcacagccctgacagtgcctgctctgtggattacagcagcagctgcctttccagcccggagcaccccactgaagactctgagagcacggagcccctcagtgtggatggcatctcctcagaccttgaagagccagctgagggtgatgaagaagaggaagaagaggagggaggcatgggcccctatgggctacaggagggcagcccccagactccagaccaggagcagtttctaaaacagcactttgagactctggccagtggagctgctccaggggccccagtgcaggtcccagagaggtcagagtctcggagtatctcttcacgattcctgttgcaagtacagacccgcccactcagggaaccatccccatcctcctcaagcctggcactgatgtcgagaccagcccaggtgccacaggcatctggtgagcagccgagaggcaatggtgccaatccccctggagcacccccggaggtggaaccgtcctctggcaaccccagcccccagcaggcagcctctgtgctgttgccacgatgccgtctcaaccctgacagcagctgggctcccaagagagtggccacagccagccccttttctggactccagaaggcccagtctgtgcacagtctggtgccacaggaaagacatgaggccagtctgcaggccccttcaccaggcgcactgctgtctcgggagatcgaagctcaggatggtctgggctccctgcccccagctgatggccgtccgtctcggcctcactcctatcagaaccccaccaccagttccatggccaagatatcccgcagtatctctgttggggagaacctgggcctggtggctgaacctcaagctcatgcccccatccgagtctcaccactcagcaagctggccctgcccagccgggctcacctggtcctggacatccccaaaccactgcctgaccgtcctaccctggctgcattctctcctgtcaccaaaggccgggcccctggcgaggcagaaaagcctggcttcccggtgggcctaggaaaagctcacagtacaactgagagatgggcctgtttgggggagggcaccactcccaagcctaggacagagtgccaggctcatcctgggcccagcagcccctgtgcccagcaactgccagtcagcagcctcttccaaggccctgaaaacttgcagcccccaccccctgagaagactcccaaccccatggaatgcaccaagccaggggcagccctgagccaggactcagagccagcggtgagcctggagcagtgtgagcagctggtggcagagctccgcggcagcgtgcgccaggcagtgcggctctaccactcggtggctggctgcaagatgccctcagcagagcaaagtcggattgcccagctcctcagagacaccttctcttcagtgcgacaggagctggaagctgtggctggggcagtgctgtccagcccaggcagcagccctggggctgtgggagccgagcagacacaggccctgctggagcaatactcagaactgttgcttcgagccgtggaacggcgtatggaacgcaaactctgagttctggaagcctgtcccaagtgaatgaatgctccagcgattccaaactgcagcccctctgcccctcaccaaaacctgcggggctgcttggagtggaaagcagggagcagtgttcagaggcaaagcagccttcccagccgctcctcgtggggggcctgtatttattaatttatttccctgactgttgcctcacttccttggaactcctgcctccacagcccctccagtggcagggacaggtcttgggtctttgtcatcttggtgctgtgagaggtaggagggcagcctgccccatctaggaatctgggaagggctggccctctcttagaagccatttgaaattactgcagggattagctccctgtggtggagcatacacagggtactctggggtcgaggtgagaggtgatgtggtattcagtgcccgtcagccaactgtgggccttcacctctacctgcacttcccctctcacaccagctgcactcccgtggctgccagagcagggtggttttccccaatacctggagctcagaaaggcagagccatctggccctccagggtgtccccagccatcaggagacttgagttggtatttggacctgagcccgcacattccactcccattctccctccaagaggggcccagcattgtatttccctgtgaccccttactctcctggccagaacttgagccagctgtgggatgttgctgcaggacagtaagccctcacctgggcaaacatgaagctctggcctcctttcctcagccccttgttcttccctgtcctccaccctggaccccagccggctgctggagcccagaggccaccttctccctgcatcctgaatgatgcttagtcagaagcctgtgttggaacatccctcgtttacggggcgctggcctacctcctgaggacctcagccacagatgagatcacacgcatgcacgtgcacacatgtacacacacacacctacctgcacagcacgctgttgagtgttggttgctagagtatctggctggctgctgtgtgcctggtttcctcacatcctgcctcagcttcaccaccctggcttatgtggaacacctatcagggagcagaaaaggggtgcagtacactaagtgaacccagattctggattcttggtgtccacagcctagctgatacgagatagcccataggacacctggtttaggtagaaggagcctcctcaaaggcagtgctgggcacccacgggtgtgctggatactggagtttgagaggagggaggtgctggggccaaaggagacactagaaaagtggtagatgggacaggtaagtggcagaggtgaggggataagttagaatgtaaaagggcagtaattaggggtgagggaaaggagataggggaccctaggaggtagagtgggaccatgtcgtgaggcagttgaagagttgaggaaaggtttttctgggccctactgctcccctctgctgcaggtaagtcagagcagctttaccacagcttcaggccacgagagccccttcacccgccctgctgcgccataggcagaggcttataaagaaatgggttctgggccaggtgtggtggctcaagcctgtaatcccagcactttgggaggccgaggcgggtggatcacctgaggttaggagttcgagatcagcctggccaacatggtgaaaccctgtctactaaaaataaaaaaattagctgggcgtggtggtgggcgcctgtaatcccagctactcgggaggtttaggcaggagaatcgcttgaaccctggaggtggaggtggaggttgcagtgagccgagatcgcgccattgcactccaacctaggtgacaaagctacacgccatctcaaaaaaaaaaaagaaaaagggttacaaaaggttcccagctccggggcatcagcctgagtgcgcttgagctgctccaaacctggcccttccccactcctctagcatcgccacccgcatggccctggaactcccgcggcggcgggggcgggcccgtgcctgctgtgccccgacttcccacaccagccgcgcccaccgcaggtgggactcaggttcgccctctgggccaggtccttcacgaggagggagctacccttcgccagaagtttgtgagaatgtggccgcccttttcctgccctctgccccatgtgggtggggggcctcgtggcccggccggcgccccgtccccttctgcatgtctgaggccaccggcaaccgccgccccactccagatttgcccccgccttgttttgaaagccccttatttataacttttatactttgtgcaggtcgcggcgcttcctgcctcatcctcggctgcatggggcgggggcgctgtttttaacgtgcccgtttgtactgatgtatgaacttgtcaataaacacaattgtttgttaaaaaaaaaaaaaaaaa

SEQ ID NO: 491 - DNA, 5942 bp, HOMO SAPIENS
gcatacctggcctcagccccccggtcgtatccctcggactgtctgcccgacgcggttgccacggtgccgccaagcgcggctgtcgcgctgccccggtgtcagcggagatggcggcagggtcgggtgggagtgggggctctgggggaggccctggaccggggccgggcgggggtgggggccccagcgggagcggctcaggaccggggtccaacgggggtctgggcagcggcggggaactgcacccgcgcactgggcgcttggtgagcctgtcggcctgtgggcgtacggcgcggcggcagcagccgggccaggagtttaaccacgggctggtgttgagccgagaacccttgcgcgatggacgcgtcttcaccgtccgcatcgaccgcaaggtcaactcctggagcggctccattgagattggggtgacagcgctggaccccagtgtgctggactttccaagcagtgccacgggcctgaaggggggctcgtgggtagtgtcgggctgctctgtgctgagagatggacgctctgtgttggaggagtatggtcaggacctggaccagcttggtgaaggggaccgcgtgggcgtggagcgcacagttgctggggagcttcggctctgggtgaatgggcgggattgcggtgtggctgccacaggcctgccccctcgtgtctgggccgtcgtggacctttatggcaagtgcacccagatcaccgtgctaccccctgagccaggcttcagcccccctactcccatccccacacctcccctcgagcccttggcccccactgaagactctgccttggctgaacaggggacctctgcagatgaaggggaaggcctgggatctagcggtgctgccacctcgcccattctcacttccaacgatgccctgctctttcatgaaaagtgcgggaccctcatcaaactcagcaacaataataagacggctgagcgccggcggcccctggatgaattcaacaatggggttgtcatgaccaatcgcccccttcgggacaatgagatgtttgagatccgtatcgacaagcttgttgataagtggtcaggctccattgagattggggtcaccacccacaaccccaacagtttggagtacccagccaccatgaccaacctccagtcaggcaccatcatgatgagcggctgtggaatcctgaccaatggcaagggcacccgccgggagtactgcgaattcagtctggatgagttgcaggagggtgaccacattggcctcacaaggaagtccaactctgccctacacttcttcattaatggtatcgatcagggagtggcaacccccttgacgcccccagtggtgtatggtgtggtggacttgtacgggatggcagtgaaggtgaccatcgtccacaataacaaccacagtgaccgtctccgccgaaacaacgccatcctgcgggcgctgtcccccgagggtgctctccgccgtgctgcccctgccgcccaggcagaacctgagcgcctgctcttccaccccaactgtgggcagaaggcagccatcacccacgagggacgcactgccctgaggccccatgccaccgatgacttcaatcacggcgtggtgctgagcagcagagccctgcgggatggagaggtgttccaggtgcgcatcgacaagatggtggacaaatgggctggctccattgaaattggtgtcaccacccacaaccctgcctacctccagttgccctccaccatgaccaacttgcgctctgggacctggatgatgactgggaatggggtgatgcacaatgggacgaccatcctggatgaatacgggcacaatctggaccgcctcaaggcaggggacacggtgggcgtggtacggcgggaggacgggactctccacttctttgtcaatgggatgactcagggccctgctgcctggaacgtgcccccgggcgtctatgctgtcgtcgatctctatggccaggcggcccaggccaccattgtggacgacgtggaggtggctccagttcctgaaccactccctgaggggaacaaccaggtgtctccaagctctccgtcctcaggggccgggggctctgacctgcgcttccatcagctgcacggcagtaacgcagtcatcactaacgggggccgcaccgccctccgccacaactgtcgcagcgagtttaatgacgccatcgtcatctccaaccgggccctgcgggatggagagctgtttgaaattgtcattcagaagatggtggaccgctggtcaggctccattgaggctggagtgactgctattcggcctgaagacctggaattccccaacaccatgacagacattgactatgacacatggatgctgagtggtacagccatcatgcaagacggtaacacgatgcgcaacaattatgggtgtgacctggatgcgctgggcacaggtgcacgcattggcatgatgcgaactgccaagggcgacctgcactacttcatcaacggccaggaccaaggcgctgcctgctcgggcctgcctccgggtaaagaggtgtatgcggtagtcgatctctatggccagtgtgtccaagtgtccatcaccaatgccaccggccccatggacaacagcctggcgaccagcaacactgccaccgagaagtccttcccactgcactccccagtggctggcgtggctcaccgattccacagtacttgcggcaagaacgtcactctagaggaggatggcacgagggcagtgcgtgccgctggctatgctcatggccttgtcttcagtaccaaggagctgagggctgaggaagtctttgaggtgaaagtggaagagctagatgagaagtgggcaggttccctgcggctggggctgaccacactagcaccgggggagatgggacccggggcaggcggtggtggcccagggctgcctccttccctgccagagctccggacgaagaccacttggatggtatccagctgtgaagtgaggcgtgatgggcacctccagaggatgaactatggccggaacctagagaggctgggggtggggagccgtgtgggtgttcgtcggggggcagatgacacgatgcacatcctggtggatggagaggatatggggcctgcagccactggcattgccaagaacgtgtgggctgtgttggatctctacgggccagtccgcggtgtgtcaattgtcagttccacgagactggaggagtcagaaggcacccagcctccttcccccagttcagacaccggcagtgagggcgaggaggatgacgagggcgaggagcatggcctgggaggccagaatgaagtgggtattatacccaccaccctcgagttcctggagaaccatgggaatggacatcttcccttgtcctgggagtcatcacctgcgcgcctgagaggctcaacttccctgcttctgcctgtgccctcaaacgggcagcctggctgctgcggggccgtggggtcttccacaacggtctcaagatctgcgagaagtttgggcccaatctggacacgtgccctgaaggcaccatcctgggactgcggctggacagctctggggggctgcatcttcatgttaatggggtggaccagggggtagctgtgccagatgtgccccagccctgccatgcgcttgtggacctctatgggcagtgtgagcaggtgacaatcgtgaaccctgagccaggggctgccagtgggaaaagtgctggaacccaaggggacatggagaaagcagacatggtggacggtatcaaagagagtgtgtgctggggtccaccacctgccgctagtcctctaaagagctgcgagtaccatgccctttgctctcgcttccaagaactcctgctgcttcctgaagattatttcatgcctccgccaaagcgaagcctgtgctactgtgagtcttgccggaagctgcgaggagacgaggcccacaggcgcagaggggagcctccccgggaatatgcactgccctttggctggtgcaggttcaacctcagagtgaatccccgcctggaggctgggacactaaccaagaagtggcacatggcatatcacgggagcaatgttgccgctgtacggagagtgctggaccgaggggagctgggagcaggtactgcctccatcctgagctgccgtcctttgaagggagaacctggggtagggttcgaggagcctggcgagaactgtgcacctcctcgggaggagcagccccctcctgtgctgctttccccctcccttcaatatgctggggcggagaccctggcctccaaagtgcaattccgggaccccaaatcccagcggacgcaccaggctcaggtggcgttccagaggagtctctccctgtgcccacatgaagctgctttttccggggccaccgggcgggagtggggaagggtgggcgcacggaagatgggggcctctgtacagttgttactgactctgatttctaaggagccaataaacaccgtctcagagcctccgcctcggcctctctctcgcgcgcccctctccggagcccgcgtcccctggggtgccaccaggtgggcccgcgaaattaaagagagctgaggatgccaaggccagtctgcagccgtcgtcgctcacgttcccggcgacggggtttgtacgccgcgggcacccgtcgcagcgcgcttccgccttctttcacctgtgaggtcggccgccgccgtgactccggaaggactcggccgggccgccggatgtgacgcaggggccagggcgcgtcggagccgctgagaaagcgcagagaaggcgggccccgtctgaggtctggcagtcagagacagccgggcgcccacggcccgagcgcccacggcagcaccatgcccgcactcctggagcgccccaagctttccaacgccatggccagggcgctgcaccggcacattatgatggagcgggagcgcaagcggcaggaggaagaagaggtggataagatgatggaacagaagatgaaggaagaacaggagagaaggaagaaaaaggagatggaagagagaatgtcattagaggagaccaaggaacaaattctgaagttggaggagaagcttttggctctacaggaagagaagcaccagcttttcctgcagctcaagaaagttttacatgaggaagaaaaacggaggcgaaaggaacagagtgacctgaccaccctgacatcagctgcataccagcagagcctgactgttcacacaggaactcatctcctcagcatgcaggggagccctggaggacacaatcgcccaggcaccctcatggcagctgacagagccaaacaaatgtttggaccccaagtgcttacgacccggcactacgtgggctcagcagctgcttttgcagggacaccagagcatggacaattccaaggcagtcctggtggtgcctatgggactgctcagcccccacctcactatgggcccacacagccagcttatagtcctagtcagcagctcagagctccttcggcattccctgcagtgcagtacctatctcagccacagccacagccctatgctgtgcatggccactttcagcccactcagacaggtttcctccagcctggtggtgccctgtccttgcaaaagcagatggaacatgctaaccagcagactggcttctccgactcatcctctctgcgccccatgcacccccaggctctgcatccagcccctggactccttgcttccccccagctccctgtgcagatgcagccagcaggaaagtcgggctttgcagctaccagccaacctggccctcggctccccttcatccaacacagccagaacccgcgattctaccacaagtgaccatcagattatatcttcaacaccacaccccccaccccatcgtgggtgagggtatcccctgtgtgtcccaggccaataaaatctacctgccactgccc

SEQ ID NO: 492 - DNA, 9239 bp, HOMO SAPIENS
gcgctggctgcgggcggtgagctgagctcgcccccggggagctgtggccggcgcccctgccggttccctgagcagcggacgttcatgctgggagggcggcgggttggaagcaggtgccaccatggctagtggcagctgtcaggggtgcgaagaggacgaggaaactctgaagaagttgatagtcaggctgaacaatgtccaggaaggaaaacagatagaaacgctggtccaaatcctggaggatctgctggtgttcacgtactccgagcacgcctccaagttatttcaaggcaaaaatatccatgtgcctctgttgatcgtcttggactcctatatgagagtcgcgagtgtgcagcaggtgggttggtcacttctgtgcaaattaatagaagtctgtccaggtacaatgcaaagcttaatgggaccccaggatgttggaaatgattgggaagtccttggtgttcaccaattgattcttaaaatgctaacagttcataatgccagtgtaaacttgtcagtgattggactgaagaccttagatctcctcctaacttcaggtaaaatcaccttgctgatattggatgaagaaagtgatattttcatgttaatttttgatgccatgcactcatttccagccaatgatgaagtccagaaacttggatgcaaagctttacatgtgctgtttgagagagtctcagaggagcaactgactgaatttgttgagaacaaagattatatgatattgttaagtgcgttaacaaattttaaagatgaagaggaaattgtgcttcatgtgctgcattgtttacattccctagcgattccttgcaataatgtggaagtcctcatgagtggcaatgtcaggtgttataatattgtggtggaagctatgaaagcattccctatgagtgaaagaattcaagaagtgagttgctgtttgctccataggcttacattaggtaattttttcaatatcctggtattaaacgaagtccatgagtttgtggtgaaagctgtgcagcagtacccagagaatgcagcattgcagatctcagcgctcagctgtttggccctcctcactgagactattttcttaaatcaagatttagaggaaaagaatgagaatcaagagaatgatgatgagggggaagaagataaattgttttggctggaagcctgttacaaagcattaacgtggcatagaaagaacaagcacgtgcaggaggccgcatgctgggcactaaataatctccttatgtaccaaaacagtttacatgagaagattggagatgaagatggccatttcccagctcatagggaagtgatgctctccatgctgatgcattcttcatcaaaggaagttttccaggcatctgcgaatgcattgtcaactctcttagaacaaaatgttaatttcagaaaaatactgttatcaaaaggaatacacctgaatgttttggagttaatgcagaagcatatacattctcctgaagtggctgaaagtggctgtaaaatgctaaatcatctttttgaaggaagcaacacttccctggatataatggcagcagtggtccccaaaatactaacagttatgaaacgtcatgagacatcattaccagtgcagctggaggcgcttcgagctattttacattttatagtgcctggcatgccagaagaatccagggaggatacagaatttcatcataagctaaatatggttaaaaaacagtgtttcaagaatgatattcacaaactggtcctagcagctttgaacaggttcattggaaatcctgggattcagaaatgtggattaaaagtaatttcttctattgtacattttcctgatgcattagagatgttatccctggaaggtgctatggattcagtgcttcacacactgcagatgtatccagatgaccaagaaattcagtgtctgggtttaagtcttataggatacttgattacaaagaagaatgtgttcataggaactggacatctgctggcaaaaattctggtttccagcttataccgatttaaggatgttgctgaaatacagactaaaggatttcagacaatcttagcaatcctcaaattgtcagcatctttttctaagctgctggtgcatcattcatttgacttagtaatattccatcaaatgtcttccaatatcatggaacaaaaggatcaacagtttctaaacctctgttgcaagtgttttgcaaaagtagctatggatgattacttaaaaaatgtgatgctagagagagcgtgtgatcagaataacagcatcatggttgaatgcttgcttctattgggagcagatgccaatcaagcaaaggagggatcttctttaatttgtcaggtatgtgagaaagagagcagtcccaaattggtggaactcttactgaatagtggatctcgtgaacaagatgtacgaaaagcgttgacgataagcattgggaaaggtgacagccagatcatcagcttgctcttaaggaggctggccctggatgtggccaacaatagcatttgccttggaggattttgtataggaaaagttgaaccttcttggcttggtcctttatttccagataagacttctaatttaaggaaacaaacaaatatagcatctacactagcaagaatggtgatcagatatcagatgaaaagtgctgtggaagaaggaacagcctcaggcagcgatggaaatttttctgaagatgtgctgtctaaatttgatgaatggacctttattcctgactcttctatggacagtgtgtttgctcaaagtgatgacctggatagtgaaggaagtgaaggctcatttcttgtgaaaaagaaatctaattcaattagtgtaggagaattttaccgagatgccgtattacagcgttgctcaccaaatttgcaaagacattccaattccttggggcccatttttgatcatgaagatttactgaagcgaaaaagaaaaatattatcttcagatgattcactcaggtcatcaaaacttcaatcccatatgaggcattcagacagcatttcttctctggcttctgagagagaatatattacatcactagacctttcagcaaatgaactaagagatattgatgccctaagccagaaatgctgtataagtgttcatttggagcatcttgaaaagctggagcttcaccagaatgcactcacgagctttccacaacagctatgtgaaactctgaagagtttgacacatttggacttgcacagtaataaatttacatcatttccttcttatttgttgaaaatgagttgtattgctaatcttgatgtctctcgaaatgacattggaccctcagtggttttagatcctacagtgaaatgtccaactctgaaacagtttaacctgtcatataaccagctgtcttttgtacctgagaacctcactgatgtggtagagaaactggagcagctcattttagaaggaaataaaatatcagggatatgctcccccttgagactgaaggaactgaagattttaaaccttagtaagaaccacatttcatccctatcagagaactttcttgaggcttgtcctaaagtggagagtttcagtgccagaatgaattttcttgctgctatgcctttcttgcctccttctatgacaatcctaaaattatctcagaacaaattttcctgtattccagaagcaattttaaatcttccacacttgcggtctttagatatgagcagcaatgatattcagtacctaccaggtcccgcacactggaaatctttgaacttaagggaactcttatttagccataatcagatcagcatcttggacttgagtgaaaaagcatatttatggtctagagtagagaaactgcatctttctcacaataaactgaaagagattcctcctgagattggctgtcttgaaaatctgacatctctggatgtcagttacaacttggaactaagatcctttcccaatgaaatggggaaattaagcaaaatatgggatcttcctttggatgaactgcatcttaactttgattttaaacatataggatgtaaagccaaagacatcataaggtttcttcaacagcgattaaaaaaggctgtgccttataaccgaatgaaacttatgattgtgggaaatactgggagtggtaaaaccaccttattgcagcaattaatgaaaaccaagaaatcagatcttggaatgcaaagtgccacagttggcatagatgtgaaagactggcctatccaaataagagacaaaagaaagagagatctcgtcctaaatgtgtgggattttgcaggtcgtgaggaattctatagtactcatccccattttatgacgcagcgagcattgtaccttgctgtctatgacctcagcaagggacaggctgaagttgatgccatgaagccttggctcttcaatataaaggctcgcgcttcttcttcccctgtgattctcgttggcacacatttggatgtttctgatgagaagcaacgcaaagcctgcatgagtaaaatcaccaaggaactcctgaataagcgagggttccctgccatacgagattaccactttgtgaatgccaccgaggaatctgatgctttggcaaaacttcggaaaaccatcataaacgagagccttaatttcaagatccgagatcagcttgttgttggacagctgattccagactgctatgtagaacttgaaaaaatcattttatcggagcgtaaaaatgtgccaattgaatttcccgtaattgaccggaaacgattattacaactagtgagagaaaatcagctgcagttagatgaaaatgagcttcctcacgcagttcactttctaaatgaatcaggagtccttcttcattttcaagacccagcactgcagttaagtgacttgtactttgtggaacccaagtggctttgtaaaatcatggcacagattttgacagtgaaagtggaaggttgtccaaaacaccctaagggcattatttcgcgtagagatgtggaaaaatttctttcaaaaaaaaggaaatttccaaagaactacatgtcacagtattttaagctcctagaaaaattccagattgctttgccaataggagaagaatatttgctggttccaagcagtttgtctgaccacaggcctgtgatagagcttccccattgtgagaactctgaaattatcatccgactatatgaaatgccttattttccaatgggattttggtcaagattaatcaatcgattacttgagatttcaccttacatgctttcagggagagaacgagcacttcgcccaaacagaatgtattggcgacaaggcatttacttaaattggtctcctgaagcttattgtctggtaggatctgaagtcttagacaatcatccagagagtttcttaaaaattacagttccttcttgtagaaaaggctgtattcttttgggccaagttgtggaccacattgattctctcatggaagaatggtttcctgggttgctggagattgatatttgtggtgaaggagaaactctgttgaagaaatgggcattatatagttttaatgatggtgaagaacatcaaaaaatcttacttgatgacttgatgaagaaagcagaggaaggagatctcttagtaaatccagatcaaccaaggctcaccattccaatatctcagattgcccctgacttgattttggctgacctgcctagaaatattatgttgaataatgatgagttggaatttgaacaagctccagagtttctcctaggtgatggcagttttggatcagtttaccgagcagcctatgaaggagaagaagtggctgtgaagatttttaataaacatacatcactcaggctgttaagacaagagcttgtggtgctttgccacctccaccaccccagtttgatatctttgctggcagctgggattcgtccccggatgttggtgatggagttagcctccaagggttccttggatcgcctgcttcagcaggacaaagccagcctcactagaaccctacagcacaggattgcactccacgtagctgatggtttgagatacctccactcagccatgattatataccgagacctgaaaccccacaatgtgctgcttttcacactgtatcccaatgctgccatcattgcaaagattgctgactacggcattgctcagtactgctgtagaatggggataaaaacatcagagggcacaccagggtttcgtgcacctgaagttgccagaggaaatgtcatttataaccaacaggctgatgtttattcatttggtttactactctatgacattttgacaactggaggtagaatagtagagggtttgaagtttccaaatgagtttgatgaattagaaatacaaggaaaattacctgatccagttaaagaatatggttgtgccccatggcctatggttgagaaattaattaaacagtgtttgaaagaaaatcctcaagaaaggcctacttctgcccaggtctttgacattttgaattcagctgaattagtctgtctgacgagacgcattttattacctaaaaacgtaattgttgaatgcatggttgctacacatcacaacagcaggaatgcaagcatttggctgggctgtgggcacaccgacagaggacagctctcatttcttgacttaaatactgaaggatacacttctgaggaagttgctgatagtagaatattgtgcttagccttggtgcatcttcctgttgaaaaggaaagctggattgtgtctgggacacagtctggtactctcctggtcatcaataccgaagatgggaaaaagagacataccctagaaaagatgactgattctgtcacttgtttgtattgcaattccttttccaagcaaagcaaacaaaaaaattttcttttggttggaaccgctgatggcaagttagcaatttttgaagataagactgttaagcttaaaggagctgctcctttgaagatactaaatataggaaatgtcagtactccattgatgtgtttgagtgaatccacaaattcaacggaaagaaatgtaatgtggggaggatgtggcacaaagattttctccttttctaatgatttcaccattcagaaactcattgagacaagaacaagccaactgttttcttatgcagctttcagtgattccaacatcataacagtggtggtagacactgctctctatattgctaagcaaaatagccctgttgtggaagtgtgggataagaaaactgaaaaactctgtggactaatagactgcgtgcactttttaagggaggtaatggtaaaagaaaacaaggaatcaaaacacaaaatgtcttattctgggagagtgaaaaccctctgccttcagaagaacactgctctttggataggaactggaggaggccatattttactcctggatctttcaactcgtcgacttatacgtgtaatttacaacttttgtaattcggtcagagtcatgatgacagcacagctaggaagccttaaaaatgtcatgctggtattgggctacaaccggaaaaatactgaaggtacacaaaagcagaaagagatacaatcttgcttgaccgtttgggacatcaatcttccacatgaagtgcaaaatttagaaaaacacattgaagtgagaaaagaattagctgaaaaaatgagacgaacatctgttgagtaagagagaaataggaattgtctttggataggaaaattattctctcctcttgtaaatatttattttaaaaatgttcacatggaaagggtactcacattttttgaaatagctcgtgtgtatgaaggaatgttattatttttaatttaaatatatgtaaaaatacttaccagtaaatgtgtattttaaagaactatttaaaacacaatgttatatttcttataaataccagttactttcgttcattaattaatgaaaataaatctgtgaagtacctaatttaagtactcatactaaaatttataaggccgataattttttgttttcttgtctgtaatggaggtaaactttattttaaattctgtgcttaagacaggactattgcttgtcgatttttctagaaatctgcacggtataatgaaaatattaagacagtttcccatgtaatgtattccttcttagattgcatcgaaatgcactatcatatatgcttgtaaatattcaaatgaatttgcactaataaagtcctttgttggtatgtgaattctctttgttgctgttgcaaacagtgcatcttacacaacttcactcaattcaaaagaaaactccattaaaagtactaatgaaaaaacatgacatactgtcaaagtcctcatatctaggaaagacacagaaactctctttgtcacagaaactctctgtgtctttcctagacataatagagttgtttttcaactctatgtttgaatgtggataccctgaattttgtataattagtgtaaatacagtgttcagtccttcaagtgatatttttatttttttattcataccactagctacttgttttctaatctgcttcattctaatgcttatattcatcttttccctaaatttgtgatgctgcagatcctacatcattcagatagaaacctttttttttttcagaattatagaattccacagctcctaccaagaccatgaggataaatatctaacacttttcagttgctgaaggagaaaggagctttagttatgatggataaaaatatctgccaccctaggcttccaaattatacttaaattgtttacatagcttaccacaataggagtatcagggccaaatacctatgtaataatttgaggtcatttctgctttaggaaaagtactttcggtaaattctttggccctgaccagtattcattatttcagataattccctgtgataggacaactagtacatttaatattctcagaacttatggcattttactatgtgaaaactttaaatttatttatattaagggtaatcaaattcttaaagatgaaagattttctgtattttaaaggaagctatgctttaacttgttatgtaattaacaaaaaaatcatatataatagagctctttgttccagtgttatctctttcattgttactttgtatttgcaattttttttaccaaagacaaattaaaaaaatgaataccatatttaaatggaataataaaggttttttaaaaactttaaaaaaaaaaaaaaaaa

SEQ ID NO: 493 - DNA, 8100 bp, HOMO SAPIENS
gatgaagtggtagagctggttcctgctcgccgcggtgccgcgcgcgccggccggccgctgggcgctccgcgctcccagcctcgagttgtgcaatcctttgtagcacgccagagtcctcctcctccgctgttgcctctcgccctctctctttttttttttttcaagctgtgagctcaaccgatgagtcagagccgtgcaatcctgacactgcatcgcaggactgggggtgacacggagggaggcagagcgctcgcgaggcggacggcacgggtgcggggcgcgccgaggctcctgcatcgcaagcggggggtgacagcccgcgcgtcccgcccgggccctgccagcaaacttctcagcctcgggaggcgcgggctggcggaagccccgcgagcgccgcggggaggcgacggcgcctgtttgtttttaaaatcgggagtgcgtgcaggcggctggagtcccggaggcgaccgaaggcggcgacccgcggcggaagggggacagccgagcccggagcccggagcccgggcaagagctgggtgccagaaccctgtggagcatcatgaactgggaagagtagctgagccccagagcctctctggaagagaaaggaagagccagcagttctttctcccagtgtccgacctcactgtccagcgtcttcctctgcccctgctctgccctccctggctcctggactagagcccggcttccagcaggacgtttccccaggggatgggcgactgttgaaggggatctcaccgccagggctcagttggccacatcatgaacctccaggcccagcccaaggctcagaacaagcggaagcgttgcctcttcgggggccaggaaccagctcccaaggagcagccccctcccctgcagcccccccagcagtccatcagagtgaaggaggagcagtacctcgggcacgagggtccaggaggggcagtctccacctctcagcctgtggaactgccccctcctagcagcctggccctgctgaactctgtggtatatgggcctgagcggacctcagcagccatgctgtcccagcaggtggcctcagtaaagtggcccaactctgtgatggctccagggcggggcccggagcgtggaggaggtgggggtgtcagtgacagcagctggcagcagcagccaggccagcctccaccccattcaacatggaactgccacagtctgtccctctacagtgcaaccaaggggagcccgcatcctggagtgggagtcccgacttactataaccaccctgaggcactgaagcgggagaaagcggggggcccacagctggaccgctatgtgcgaccaatgatgccacagaaggtgcagctggaggtagggcggccccaggcacccctgaattctttccacgcagccaagaaacccccaaaccagtcactgcccctgcaacccttccagctggcattcggccaccaggtgaaccggcaggtcttccggcagggcccaccgcccccaaacccggtggctgccttccctccacagaagcagcagcagcagcagcaaccacagcagcagcagcagcagcagcaggcagccctaccccagatgccgctctttgagaacttctattccatgccgcagcaaccctcgcagcaaccccaggactttggcctgcagccagctgggccactgggacagtcccacctggctcaccacagcatggcaccctaccccttcccccccaacccagatatgaacccagaactgcgcaaggcccttctgcaggactcagccccgcagccagcgctacctcaggtccagatccccttcccccgccgctcccgccgcctctctaaggagggtatcctgcctcccagcgccctggatggggctggcacccagcctgggcaggaggccactggcaacctgttcctacatcactggcccctgcagcagccgccacctggctccctggggcagccccatcctgaagctctgggattcccgctggagctgagggagtcgcagctactgcctgatggggagagactagcacccaatggccgggagcgagaggctcctgccatgggcagcgaggagggcatgagggcagtgagcacaggggactgtgggcaggtgctacggggcggagtgatccagagcacgcgacggaggcgccgggcatcccaggaggccaatttgctgaccctggcccagaaggctgtggagctggcctcactgcagaatgcaaaggatggcagtggttctgaagagaagcggaaaagtgtattggcctcaactaccaagtgtggggtggagttttctgagccttccttagccaccaagcgagcacgagaagacagtgggatggtacccctcatcatcccagtgtctgtgcctgtgcgaactgtggacccaactgaggcagcccaggctggaggtcttgatgaggacgggaagggtcctgaacagaaccctgctgagcacaagccatcagtcatcgtcacccgcaggcggtccacccgaatccccgggacagatgctcaagctcaggcagaggacatgaatgtcaagttggagggggagccttccgtgcggaaaccaaagcagcggcccaggcccgagcccctcatcatccccaccaaggcgggcactttcatcgcccctcccgtctactccaacatcaccccataccagagccacctgcgctctcccgtgcgcctagctgaccacccctctgagcggagctttgagctacctccctacacgccgccccccatcctcagccctgtgcgggaaggctctggcctctacttcaatgccatcatatcaaccagcaccatccctgcccctcctcccatcacgcctaagagtgcccatcgcacgctgctccggactaacagtgctgaagtaaccccgcctgtcctctctgtgatgggggaggccaccccagtgagcatcgagccacggatcaacgtgggctcccggttccaggcagaaatccccttgatgagggaccgtgccctggcagctgcagatccccacaaggctgacttggtgtggcagccatgggaggacctagagagcagccgggagaagcagaggcaagtggaagacctgctgacagccgcctgctccagcattttccctggtgctggcaccaaccaggagctggccctgcactgtctgcacgaatccagaggagacatcctggaaacgctgaataagctgctgctgaagaagcccctgcggccccacaaccatccgctggcaacttatcactacacaggctctgaccagtggaagatggccgagaggaagctgttcaacaaaggcattgccatctacaagaaggatttcttcctggtgcagaagctgatccagaccaagaccgtggcccagtgcgtggagttctactacacctacaagaagcaggtgaaaatcggccgcaatgggactctaacctttggggatgtggatacgagcgatgagaagtcggcccaggaagaggttgaagtggatattaagacttcccaaaagttcccaagggtgcctcttcccagaagagagtccccaagtgaagagaggctggagcccaagagggaggtgaaggagcccaggaaggagggggaggaggaggtgccagagatccaagagaaggaggagcaggaagaggggcgagagcgcagcaggcgggcagcggcagtcaaagccacgcagacactacaggccaatgagtcggccagtgacatcctcatcctccggagccacgagtccaacgcccctgggtctgccggtggccaggcctcggagaagccaagggaagggacagggaagtcacgaagggcactacctttttcagagaagaagaaaaaaacagagacattcagtaagacccagaatcaggagaacactttcccctgtaaaaaatgtggcaggtaaggtgggcagcgctgtccccgctgggacccccgcgggctggtgcgcggagggggcgggggtggggtggaggggagggggaagaggtacaggcggtgtccgcctcgtttctggttggctcagcgggtttctagggctgtgacgtcatggggcagctttcggaaaatgacgcgagctggccggccgcggctgtgcagcgtgggggtgaaggtgaaggctggggctcctcgcgcacccgcgctgggggcccccgggtgggctaggccggttctgagcaacccccacccggctgcagggtgttttacaaggtgaagagccgcagtgcgcatatgaagagccacgcagagcaggagaagaaggctgcagcgctgaggctgaaggagaaagaggccgctgctgccgccgccgccgcccaccagcaggccctgcgggaggagagcggtgcgggcgacaagggctgagcgcgggagccaggctggcccagtcctgggcctcggcccttcccgcaccgccgccagcgcccgcagacaccctggcatctcaagagggagtgaggagaggattgcagggacttttccctgcgaaacaaatgagacaatgacataaacggctcttttatttatgaaggccctgggagcagcgttaagggctccaggatccagctctctttgcatttggtctgtcggaagctgtcctcgtgctttcctggaccgggagagtcccggtcccctcgggagggactccaccgcctctcacactccgatttctgctgctctgctgccccgcagtcttttccctttatttgcttccccctcctcccctcggcctccaggaagccaccgtggccggccaagcacaagctcacccactttggagcagcatttctcctccccagaggacctcgaaggctgcaacggccctgccccaagccccagaaaaagaaactcttggagggagtctgcgggcttctctgagaaggggcgcagcctgacacctgtgctgtccctgcagtctctaggcctgtctgagctgctcccgtgaccgtgtcctgagtggccacctcctccttgggagggaggccgcggcaggtactctccctttgctgcttgctggcggccttgctagggctagaaagttttctcagcgttgggggaggggctagcgttcttgtccaaagcactcatcctgctgcagggaagggagctgtacggaggctggaagctgcagggttaggcccgagagagcttttgacaagcctggctcttcctgcttcccacctttttggctgaatacctttgggtcctggaggctgccaagggcgcttcgccttgagcaggtcccggagaggctcagcctgcccctcctggggccagcctccttgcctctgctctgacctcagcagctacacctaaccccaccgcaccctacccagtgtcgatatccacaacccagcccccaggcctgcactttggagatttctggatccttccctgggagggagaggtctcctaactcgattggacaggagccttcattccttgactcgtgtcatttgggagctatttatttattcttagtatttaatttttaacatcctctcagggaccaggggcctcctgcttttcagaggcccgagtgcatttatcccaaaacgaggcatcttgacatcccctatccccaccccctaaattcccaaggccctaaggtccctcacctggttgctctggaagctcttgctgataggaatgatagcaacactgaaagagcgtgggaaggtggagggtgtcaccagacccacacagagcaagggagattaaggcagttcttgctgccccttctctggctgtgctttgcctgagggaagagttggcaagaggccagaattctagtttggtttatggggcctggattctggcttgaagaagccatatttggcatgggtgaagtgaaagggccaggaggttctggaggccccttcacttccagtcccatagcggggctcagctatttttctgatcttattcaactttagttgtgcaaaagaaattctaagtgaatgcgcgtatgacaggtcaacgtattaggaaggagccagaaagtattcatactgctactccttatgagatagccaagaagcatcatgtcagtaactgggagtggagagggagttttgttttgaaactatgcaggtatttttcagcatccatttgtacattagtatggttctacaggaccccagctgtggaagtaacaaatttcttctccctccagactcttggatgactacctagatccccagcttaccggttagtttcctccacaggcttccatgagctcagtgtcccaagacagcaaaaatctggtataccctgtagaagcaggggggtagcaaatttaggctctcttcgaaattacttgtacaatacgagtgccttcgcagcttagccccaaagtgctacttatgtttcccaaggtcttttctattcaaatcatatttggtttcaggcccctttatgggcatacggtaacagaaacctccatcattcatatgagacccttttgtcagtggtaacatcttgtacttggaaaaaaaatttttttttttttttttttttttttttgagacagagtctcattctgtcgcccaggctggagtgcagtggtgtgatcttggctcactgcaacctccgcctcttgggttaaaagaattctcctgcctcagcctcctgagtagctgggattataggcacacaccaccacacccagctaatctttttgtatttttttttttagtagagacagggtttcgccatgtcggccaggctggtcttgaactcctgacctcaggtggtccacccgcctcggcctcccaaagtgctggcattacaggcgtgaaccaccgtgcctggccggaagtctttaaaaaataaagtgattctactcttctaagcttacagagaccagaccaggtgaatgtaactggggaaaatcaagatggtacctctctgcattatcccgccagacactgtattttatgcattcatgtctaggatacagtgtgaaaattaaaaagtttagagggcagatgcaattgtggcaagtgacctgccaataaagcaggtgcagctatagaagctggcataggtatatccttaatggtgctttctccctgggcttgtctttttgttgtttttttccccctatattcagagctccttgagaagtgataaacacctccagctttctaacatcctccccacaccatctcaccatatccatctcccagcatccatctgcattcagctaagggcgggaaactgacctagtgcctgtgttgcagaccatttctgaggtctccaccatccaaggaggcacagccgtcattactgtcctccatgccttcagcagcccccctcacagctaaggtacataccaccccttctgccgcgcctccacccctggcaccaaggtcttctgctgcttatgtctaaagggatcacctatatttaactgcctcagtgacctaacctctttcttctcatgtgccagatgttaagatgaaggaggaatacaacacatactcaagcctcagcctgtttagttgttttcactggggctcgcttttctgggacggtatttattatcagactggcaagcctaactccataggtttacaggaagtagggatatttttataaaacaattgtgtcctccccacattttgctatgttaatatttgcttctaacaatttgcagctgtttcactttttcctcatttgtctctaagttgaaggctttgttggaggggacagagcacaggaacagccttgacagtctgtaattattgtacagatattttaatagcatataaataagtatattccttttattttgaaacaaaaatgatcagacactgccttttgtgtgtttgctgcctgtggcatccttttttaaaaagactgttacatattaaaatagtgtacatatataaatattacctcttttgctgtacagttgtgatagagactgaagattttattttttgtgtgctttttataagaaaaaaattaatacactaaagaatcttgctgatgtgattgtaatgtacctatgtaacttatttacttttgaatgttcttctgtatctttaaaccttttattaaataaggttttaaaaattca

SEQ ID NO: 494 - DNA, 5345 bp, HOMO SAPIENS
tggttccagtcagcgagcaggacagaggagcccggaagaggcgccgtgcacttccgggtcgaagagcgcacggcggcggcagaggcggcggcggccgggcctaggagcgactctcggtcgtgcagcggcggcgagcgctcgcgagcggctgcgggacgcgaggtttccggagctgagctcaatgtgcagcaatggatgacgacagcctggatgagcttgtggcccggagcccagggccggatggacacccacaggtcggccctgcggacccggcaggtgactttgaagaaagcagcgtgggcagcagtggggactctggggacgacagtgacagcgagcatggagatggcacagacggagaagacgagggggcgtctgaggaggaagacctggaagacagatctggttccgaggattctgaagacgacggggagacattgctggaggtagcgggtactcaggggaaactggaagccgctggctctttcaattctgatgatgatgcagagagctgcccaatctgtctcaacgcattcagagaccaggccgtggggacgccggagaactgtgcccattacttctgcctggactgcattgtcgaatggtccaagaatgccaattcctgtccagttgatcgaactctatttaagtgcatttgtattcgagctcaatttggtggtaaaatcttaagaaagatcccagtggagaacaccaaagcgagcgaggaggaggaggacccgaccttctgtgaggtgtgcggcaggagcgaccgtgaggacaggcttttgctctgcgacggctgcgatgcggggtaccacatggaatgcttggacccccctctccaggaggtgccggtggacgagtggttctgcccggaatgtgctgcgcctggtgttgtccttgccgctgatgcgggtcccgtgagtgaggaggaggtctccctgctcttggctgatgtggtgcccaccaccagcaggcttcggcctcgagcaggtaggacccgggcgatagccaggacacggcagagtgagagagtgagagcaaccgtgaaccggaaccggatctccacggccaggagggtccagcacacaccagggcgcctcgggtcttccctgctggatgaagccatcgaggctgtggcgactggcctgagcactgccgtgtatcagcgccccctgacgccgcgcactcccgcccgacggaagaggaagacaagaagacggaagaaagtgccgggaagaaagaaaaccccgtccggaccatccgcaaaaagtaagagctcagcgacaagatctaagaaacgccaacatcgagtgaagaagagaagagggaagaaggtaaagagtgaagccaccactcgctctcgaatcgcgcggacgctgggcctgcgcaggcctgttcacagcagctgcatcccgtcagtgttgaagccagtggagccctctttggggctgctgagagcggatattggagctgcctctctgtctctgtttggagatccttatgagctggatcccttcgacagcagtgaagagctttctgcaaaccctctttcccctctgagtgccaagagacgggctctgtcccggtcagccctgcagtcccaccagcccgtggccaggcccgtctccgtggggctttccaggaggcgcctccctgccgcggtgccagagccagacttggaggaggagccagtgcctgacctgctgggcagcatcctgtcgggccagagcctcctgatgctgggcagcagtgatgtcatcatccaccgcgacggctccctcagcgccaagagggcggctccagtttcttttcagcgaaactcaggcagtctgtccagaggggaagaaggattcaagggctgcctgcagccccgagcactgccctccgggagcccggcccaaggcccgtcaggaaacaggccacagagcacagggctcagctgtcaaggcaggtcccgcacccccgcccgcaccgcgggggcgcctgtgaggctggacttgccagcagcccctggggcggttcaggctcggaacttgtcaaatgggagtgtgcctggcttcagacagagccacagcccctggttcaacggcaccaacaagcacaccttgccccttgcctctgccgcgtctaagatctcaagcagagattctaagcccccatgtcgcagtgtggtgccggggcctcccctgaagccagcgcccagaagaacagacatctctgagctacccaggataccaaagatcaggagagatgacggtggtggcagacgggatgcggccccggcccacgggcagagcattgagatccccagtgcctgcatcagccgactgactggcagggagggcaccgggcagccagggcgaggcacacgggcagagagcgaggccagcagcagggtgccccgggagcccggggtgcacacgggcagctcccggcccccagcccccagctcccatggcagtttggccccactgggaccatcaagagggaaaggggtcgggtcgacctttgagagcttccggatcaatattcctggaaacatggcacattccagccagctctccagccctggcttctgtaacacgttccggcctgtggacgataaggagcagaggaaggagaacccctcacccctcttctccatcaagaagacgaagcagctgcggagcgaggtctacgacccatccgaccccaccggctccgactccagcgcccctggcagcagccccgagaggtctggccccggcctcctgccctctgagatcacacgaaccatctccatcaacagcccgaaggcccagacggtgcaggctgtgcgctgcgtcacctcctacacggtggagagcatctttggtacagagcccgaaccccctctcggaccgtcctccgccatgtccaagctccggggtgcagtggctgccgagggggcctctgacacggagcgagaggagcccacagagagccagggcctggctgcccggctgcggaggccatcccccccagagccctgggatgaggaggatggggcgtcttgcagcaccttctttggctctgaggagcggacggtgacctgtgtgactgtcgtggagccggaagccccacccagcccggacgtgctgcaggctgccacccacagagtcgtggagctcaggcccccttcccggtcccgctccacatccagctcccgcagcaggaagaaggccaagaggaagagggtgtccagggagcacggacggacgcgctctgggacgcgctctgaatccagggacaggagctcgaggtcagcgtcaccatcagtgggtgaggagcgccccaggaggcagcggtccaaggccaagagccggcggtcctccagtgaccgctccagcagccgagagcgagctaagaggaagaaagccaaggacaagagcagggagcacaggcggggcccctggggccacagccggaggacgtcccggtcgcggtcggggagccctggcagctcttcctatgagcactatgagagtaggaagaagaagaaaaggagatcagcgtccagacctcggggaagggagtgctcccccaccagcagcctggagaggctctgcaggcacaagcatcagcgggaacgcagccacgagcggccagacaggaaggagagtgtggcgtggccccgagaccggaggaagcggaggtcccggtccccaagctcggagcacagggcacgggagcacaggcggcctcggtcccgtgagaagtggccgcagacccggtcccattccccagagaggaagggggctgtgagggaggcttccccagcgccccttgcacagggggagccagggcgggaagacctccccaccaggttgccagccttgggggaagcacatgtctcgccggaggtggctacggccgacaaggcccccctgcaggctccccctgtcctggaggtggcagctgagtgtgagccggacgacctggacctggattatggcgactccgtggaggccggacacgtctttgatgatttctcaagcgacgccgttttcatccagctcgatgacatgagctcgccaccttctcccgaaagcacagactcttccccggagcgagacttcccactgaagcctgcgttgcccccagccagcctggccgtggccgccatccagagggaggtgtcattgatgcacgatgaagacccttcgcagcccccacccctgccagagggcacccaggagccacatttgctcaggccggacgcggctgagaaggctgaggcacccagttccccggatgtggcgcctgcggggaaggaagacagcccctctgcgagtgggagggtacaggaggcagcccggcctgaggaggtggtttcgcagacccccctgctgcggtccagagccctggtgaagcgggtcacctggaacctgcaggagtcggagagcagcgcccccgccgaggacagagccccccgggcaccacttcacaggccacagaagccccgagaaggagcctgggacatggaggatgtggcccccacaggggtcaggcaggtgttctccgagctgccctttcccagtcacgtgcttccggaacccgggttcccagacacagacccctctcaggtttacagccccggcctgccgcctgccccggcccagccctcaagcatcccaccctgcgcactggtcagccagcccacggtccagttcatccttcaggggagcctgccgctagtgggctgtggggcagcacagaccctggccccagtgcccgctgccctgaccccagcctcagagccagccagtcaagccactgcagccagcaactcggaggagaagaccccggcccccaggctagctgcggagaaaaccaagaaggaggagtacatgaagaagctgcacatgcaggagcgtgctgtggaggaggtgaagctggccatcaagcccttctaccagaagagggaggtgaccaaggaggagtacaaggacatcctgcgcaaggccgtgcagaagatctgccacagcaagagtggagagatcaaccccgtgaaggtggccaacctggtgaaggcgtacgtggacaagtacaggcacatgcgcaggcacaagaaaccagaggccggggaggagccgcccacgcagggggccgagggctgaggccaggcaatcacgggctatgcccggggagctgtcgggagtggcgggaatcggggccatgcccgcatgcctgccgtcgggttcctgcgctgacacctggtctgtgcacctgtgttgctcacagttgaaaactggacacttttgtatgtatattatagagacactgtttccattctaatttatcaaaaatggattatctttaga

SEQ ID NO: 495 - DNA, 3033 bp, HOMO SAPIENS
gcgggggcgcgtcggggctggagccggagcgcgccgggcgctgggcgcagcgagcgagagcgcggcggccgcgggctccggcgagggacagacgcaccgatcgccggagggacagacacacgaccacgcggcgccaccgcccacgcctccacccaccggcgcccaagtcctccccgcgccgcctcctctgtatggcacaaactttcctcccgggacggaacacgctgcctcagggagcccgcgaccgcgccttctcctccgccggtcccatacgctgctgaaatgggttgcggattgaacaagttagagaaacgtgatgaaaaacggcctgggaatatttattcaactttgaagaggcctcaggtggaaaccaagatagatgtgtcctatgaataccgcttcctggagttcacgactctgagtgctgcggagctccctgggtcctcagcagtgaggctggcctccctgcgtgacctgcccgcccagctcctggagctgtaccagcagggcttctcgctggcggccctgcaccccttcgtgcagcccacccatgagcgggagaagacgcccctggagcacatctttagagccatcctgatcaagaaaaccgacagatctcagaaaactgatcttcacaatgaaggctacatcttggaattagattgctgttcctccttagaccacccgacagaccagaaactcatcccagagttcattaagaagatccaggaggctgcaagccagggcctgaaattcgttggtgttatacctcagtaccattcctctgtgaactcggcaggcagcagtgctccggtgtctactgccaacagcaccgaggatgccagagatgcaaaaaacgcacgtggggatcacgcgtcactggagaatgagaaaccggggactggggatgtgtgcagtgctccggctgggagaaaccaaagcccagagcccagctcaggccccagaggggaggtgcccctcgccaagcagcccagctcaccctccggagagggagatggtggagaactttcaccacagggggtgagcaagacactggatggaccggagagcaaccccttggaggtgcatgaagagccactctcagggaaaatggagatcttcacccttttcaacaaaccgaagagccatcagaagtgccggcaatactaccctgtcaccattcctctccatgtctccaagaatggccagacagtgagcggtttggacgccaactggttagagcacatgagcgaccacttccggaaaggaggcatgctggtgaacgcagtcttctaccttggaatagtgaatgattccttacatggcttgacagatggagtattcatctttgaagctgtttccacagaagatagcaaaaccatacagggctatgatgctattgtggttgaacaatggacagtcctggaaggtgtcgaagtgcagacagactacgtgcccctgctgaactcgctggcggcctatggctggcagctcacctgtgtgctaccaactcccgtcgtcaagactaccagcgaggggagtgtatccaccaagcagattgtctttcttcagagaccttgtctacctcagaaaatcaagaagaaggaatcgaagtttcagtggcgattctccagagaagaaatgcacaacaggcagatgaggaaatcaaaaggtaaactcagtgccagagacaaacaacaagcagaagaaaatgagaagaacttagaagaccagtcttccaaagctggagacatgggaaactgtgtttcaggacagcagcaggagggtggagtctccgaggagatgaagggccctgtccaagaggacaagggagaacagctgtcccctggtggcctgctgtgtggggtgggtgtggagggtgaggctgtgcagaatggtcctgccagccacagcagggccctggtggggatttgcactgggcactccaatcctggagaggatgccagggacggggatgctgaggaagtcagagagcttggtacggttgaagaaaactgagtcttgggcaatttgtgctaaaactaggtgagttgccaaacccaaggcatcttaccaacagctggtttgggggctggtttccctggtgttgtgtgttacctaccctttggcttggcttgacctctccttgtgagctcacctgagccctcccagggccaggttcctgacagtgttggtttttgcacatccactggaaaggtgtcattaatgacccagtgttagaatgcaagaggtcaggttattctagccctcatggctgaaggcccagtcctggctccaccactcctccagccagagggtctggaccatccagtgcctgtcctcgccacagggcctccagggagcattcgggtcaaatccatggacaccctgggctacaaaccaaggctgctgttcatcccacatcgtgtggggcagtgtccatcccctgcagctacttggtgacttaacaactccaggagccctgtcagctgccctcctccacctaaaccccttcgactcttctgctttgacaaagaaaatgacattggggaggggaggtgctccgcctcccagcttttctcaaaatagtcctatagatactggtaatctggaaatgaagaagtaattctgtctctgcacctacttttgcagaatgttcaaggaagtattctgtgttagtattaatgccaaaaagttgtttttaaaggttttgtactcagcacatcatacaaaccacattacttctgtcacttcagggcatcgggactggctggcgcccttgttatgtgctattttaatcagtgtaacattggtcaagttgttacccatgtatgctgtgtttatcatgtgtatatcgtccagaaagtattaaggctttaggtagatgcaactggcgaaccttggagagggaatgctgattgtcttgaccaaacccacagcctgtctcttctcttgtttagttacttacggcaataaatcatctatgagttagtgcaccgtgaaaaaaaaaaaaaaaaaaaaaaaaaaaaaaaa

SEQ ID NO: 496 - DNA, 8123 bp, HOMO SAPIENS
gaccacaacatggctgcggcgcctgggctgctcgtctggctgctcgtgctccggctgccctggcgggtgccgggccagctggaccccagcactggccggcggttctcggagcacaaactctgcgcggacgacgaatgcagcatgttaatgtaccgcggtgaggctcttgaagatttcacaggcccggattgtcgttttgtgaattttaaaaaaggtgatcctgtatatgtttactataaactggcaagaggatggcctgaagtttgggctggaagtgttggacgcacttttggatattttccaaaagatttaatccaggtagttcatgaatataccaaagaagagctacaagttccaacagatgagacggattttgtttgttttgatggaggaagagatgattttcataattataatgtagaagaacttttagggtttttggaactgtacaattctgcagctacagattctgagaaagctgtagaaaaaactttacaggatatggaaaaaaaccctgaattatctaaggaaagggaacctgaacctgaaccagtagaagccaactcagaggaaagtgatagtgtattctcagaaaacactgaggatcttcaggaacagtttacaactcagaagcaccactcccatgcaaacagccaagcaaatcatgctcagggagagcaggcttcatttgaatcttttgaagaaatgctgcaagataaactaaaagtgccagaaagtgaaaacaacaaaaccagcaatagttctcaggtctcaaatgaacaggataagattgatgcctataaacttttgaaaaaagaaatgactctagacttgaaaaccaaatttggctcaacagctgatgcacttgtatctgatgatgagacaaccagactcgttacttcattagaagatgattttgatgaggaattggatactgagtattatgcagttggaaaggaagatgaggagaaccaagaagactttgatgagttgccattacttacctttacagatggggaagatatgaaaactccagcaaagtctggcgttgagaaatatccaacagataaagagcagaattcaaatgaagaggacaaggttcagctaactgtgccccctggcatcaaaaatgatgataaaaatatactaacaacctggggggacactatcttctctattgtcacaggaggtgaagaaacaagagatacgatggatttagagagctctagttcagaggaagaaaaagaagatgatgatgatgcattagtcccagatagcaaacaggggaaaccacagtcagcaacagattatagtgaccctgacaatgtagatgatggtctttttattgtagacattcctaaaacaaataatgacaaagaagtaaacgcagaacatcacattaaaggaaaagggaggggagttcaggaatccaagaggggcctggtacaagataagacagaattagaggatgaaaatcaagaaggcatgactgtgcacagttctgttcacagcaataacctcaactctatgccagctgctgaaaagggtaaagacacattaaaatcagcttatgatgatacagaaaatgacctaaaaggagcagctattcatatctcaaaaggaatgctccacgaagaaaagcctggagagcagattttggaaggtggctcagagagtgaatctgcacagaaagctgcagggaatcaaatgaatgacagaaagattcaacaggaatccctgggtagtgcaccactcatgggagatgaccaccctaacgcatccagagacagtgtggagggagacgctttggtaaatggggccaaactgcacacgctttcagtggagcatcaacgtgaggaattgaaagaggaattagttcttaaaactcaaaaccaacctagattctcctctccagatgagattgatttgcccagagaactggaagacgaggttcccattctgggaagaaatcttccctggcaacaagaaagagatgtggctgccacagccagtaagcaaatgagtgagaagataaggctctctgagggagaagccaaagaggactccttggatgaagagttttttcatcacaaggcaatgcagggcacagaggtaggacagacagaccaaactgacagcacaggaggaccagctttcctttctaaagtagaagaggatgattatccctctgaagaactactagaggatgaaaacgctataaatgcaaaacggtctaaagaaaaaaaccctgggaatcagggcaggcagtttgatgttaatctgcaagtccctgacagagcagttttagggaccattcatccagatccagaaattgaagaaagcaagcaagaaactagtatgattttggatagcgaaaaaacaagtgagactgctgccaaaggggtcaacacaggaggcagggaaccaaatacaatggtggaaaaagaacgccctctggcagataagaaagcacagagaccatttgaacgaagtgacttttctgacagcataaaaattcagactccagaattaggtgaagtgtttcagaataaagattctgattatctgaagaacgacaaccctgaggaacatctgaagacctcagggcttgcaggggagcctgagggagaactctcaaaagaggaccatgagaacacagagaagtacatgggcacagaaagccaggggtctgctgctgcagaacctgaagatgactcgttccactggactccacatacaagtgtagagccagggcatagtgacaagagggaggacttacttatcataagcagcttctttaaagaacaacagtctttgcagcggttccagaagtactttaatgtccatgagctggaagccttgctacaagaaatgtcatcaaaactgaagtcagcgcagcaggagagcctgccctataatatggaaaaagtcctagataaggtcttccgtgcttctgagtcacaaattctgagcatagcagaaaaaatgcttgatactcgtgtggctgaaaatagagatctgggaatgaacgaaaataacatatttgaagaggctgcagtgcttgatgacattcaagacctcatctattttgtcaggtacaagcactccacagcagaggagacagccacactggtgatggcaccacctctagaggaaggcttgggtggagcaatggaagagatgcaaccactgcatgaagataatttctcacgagagaagacagcagaacttaatgtgcaggttcctgaagaacccacccacttggaccaacgtgtgattggggacactcatgcctcagaagtgtcacagaagccaaatactgagaaagacctggacccagggccagttacaacagaagacactcctatggatgctattgatgcaaacaagcaaccagagacagccgccgaagagccggcaagtgtcacacctttggaaaacgcaatccttctaatatattcattcatgttttatttaactaagtcgctagttgctacattgcctgatgatgttcagcctgggcctgatttttatggactgccatggaaacctgtatttatcactgccttcttgggaattgcttcgtttgccattttcttatggagaactgtccttgttgtgaaggatagagtatatcaagtcacggaacagcaaatttctgagaagttgaagactatcatgaaagaaaatacagaacttgtacaaaaattgtcaaattatgaacagaagatcaaggaatcaaagaaacatgttcaggaaaccaggaaacaaaatatgattctctctgatgaagcaattaaatataaggataaaatcaagacacttgaaaaaaatcaggaaattctggatgacacagctaaaaatcttcgtgttatgctagaatctgagagagaacagaatgtcaagaatcaggacttgatatcagaaaacaagaaatctatagagaagttaaaggatgttatttcaatgaatgcctcagaattttcagaggttcagattgcacttaatgaagctaagcttagtgaagagaaggtgaagtctgaatgccatcgggttcaagaagaaaatgctaggcttaagaagaaaaaagagcagttgcagcaggaaatcgaagactggagtaaattacatgctgagctcagtgagcaaatcaaatcatttgagaagtctcagaaagatttggaagtagctcttactcacaaggatgataatattaatgctttgactaactgcattacacagttgaatctgttagagtgtgaatctgaatctgagggtcaaaataaaggtggaaatgattcagatgaattagcaaatggagaagtgggaggtgaccggaatgagaagatgaaaaatcaaattaagcagatgatggatgtctctcggacacagactgcaatatcggtagttgaagaggatctaaagcttttacagcttaagctaagagcctccgtgtccactaaatgtaacctggaagaccaggtaaagaaattggaagatgaccgcaactcactacaagctgccaaagctggactggaagatgaatgcaaaaccttgaggcagaaagtggagattctgaatgagctctatcagcagaaggagatggctttgcaaaagaaactgagtcaagaagagtatgaacggcaagaaagagagcacaggctgtcagctgcagatgaaaaggcagtttcggctgcagaggaagtaaaaacttacaagcggagaattgaagaaatggaggatgaattacagaagacagagcggtcatttaaaaaccagatcgctacccatgagaagaaagctcatgaaaactggctcaaagctcgtgctgcagaaagagctatagctgaagagaaaagggaagctgccaatttgagacacaaattattagaattaacacaaaagatggcaatgctgcaagaagaacctgtgattgtaaaaccaatgccaggaaaaccaaatacacaaaaccctccacggagaggtcctctgagccagaatggctcttttggcccatcccctgtgagtggtggagaatgctcccctccattgacagtggagccacccgtgagacctctctctgctactctcaatcgaagagatatgcctagaagtgaatttggatcagtggacgggcctctacctcatcctcgatggtcagctgaggcatctgggaaaccctctccttctgatccaggatctggtacagctaccatgatgaacagcagctcaagaggctcttcccctaccagggtactcgatgaaggcaaggttaatatggctccaaaagggccccctcctttcccaggagtccctctcatgagcacccccatgggaggccctgtaccaccacccattcgatatggaccaccacctcagctctgcggaccttttgggcctcggccacttcctccaccctttggccctggtatgcgtccaccactaggcttaagagaatttgcaccaggcgttccaccaggaagacgggacctgcctctccaccctcggggatttttacctggacacgcaccatttagacctttaggttcacttggcccaagagagtactttattcctggtacccgattaccacccccaacccatggtccccaggaatacccaccaccacctgctgtaagagacttactgccgtcaggctctagagatgagcctccacctgcctctcagagcactagccaggactgttcacaggctttaaaacagagcccataaaactatgacctctgaggtttcattggaaagaaagtgtactgtgcattatccattacagtaaaggatttcattggcttcaaaatccaaaagtttattttaaaaggtttgttgttagaactaagctgccttggcagtgtgcatttttgagccaaacaattcaaaaatgtcatttcttccctaaataaaaatcaccttttaagctagagcgtccttacaactttgaaatgtgcaataaagaatacctgtgttttagctaatgtagcatatgtaattgcaaaatgatttagaatgtcatgaaaaatatgaacatttcctgtggaaatgctttaagaacatgtatttccattatcctatttttagtgtacaccagctgaatacggagcaatggtgtttataagcgtttttttaaactatctggtcacaaagactgttacgctaaaaatgtttactaaaagatcactaaactatctcccctcttgctgaagttctttgtagtaatagctcataaaaatttgtttattaatatttcccaagtgtctgttgactcattggactgttatgaggcttgtgccatttggggaacatgtaaactcaggctcccagaactgaagatggtggctggtggcacacttccggctgctcctccgtcacctgtgaactctacaagtgacgtctttttatttcaaagaagtttatttcccacttgtatagcattcacatgctttctttacgatcctcattgtctatttgagaatggttttctgagagtgagtttacattagtagcaagagttgtttgacctgatgttccattgtttttaccattcctgtagaaaaagggtgcacaacagaaaaatgaaaatgatgtgtcatggccataaaagtatagaaatctttaaaaattttaaaatgtacagtcccttatctatctttcccattccttgccactgatttttgaggaatataataaaaagattggaagagtataatgccatgagaaagaatgatttaggactgtgagggttataacatgccctaggtcagcaaccaagggttgaaatcagttctgttttagggggaaatgggggcgacagatattattccaaaattaatattaattaatatttaaacgttggtgtttttatttaaaaatcagtaactaaccatctggaattgcaccatacttaaagtcttatccattactacactgtctttaaaacaatgtttctttaaatactctacaacgtttctaagaacgaacttcagacattttaattacagtaataatagcactccttttaaggagtttcagatccacactaaaactaaaatcataaaaggctgatacttttgtttgctgctaggctatattcttccattctttgaagtcctatgatgtaatatttttgaaacctagtgtatgtcttgtcactgttgtgatatttaatcgattaagaataccttgtaaaaaggagcaaaagcttcaatgtgaaacaattttctctctttatactaaacaactgaagatagatagtttagaaagataaggacctttgaaagaagacaactctgtcaaagttcataaggaatataaaaattcttcaggaaaagagaattcaatctatatgtcctcccgtttaatatcaagaatagaagaaattaagaggaaaactccacagaagagcataggccacttttagccatgtaaaaataagattaagtcacaaatacaacttttgaatttacctgtcaatatctctttaggacacaaaacaatgctgaagttaatataatttctaattttaaatgtcatttaagtgtagattatgccatctaggaaggtaagtaggaaaggtaaattaaatctatttttaaaattcaaaatattagagtatttttcccctctaaagccttttttggtgattattctgtatctgacataattgagaaactggtaagctgtaaagattccagtgtagcttctctgagaagttgtgagccagtccataactgcttcctcacatccatctgattgcaccatttctgcagcaaaccccaaagcagggtgccaatatgcagatggcatagggagtatcatccctcagccaaatcacttttccatctctaaagtttcatctattttggaagtcatctccaactaattgtgtctggatttagttgctaaaattgtcttatttatgaagcagcaatattcagcctgaaagcatttctgccatagttgttgtagttatatcgccaatggctgatttttttcattggaaagtaaatttaagtaattcgtgggatgtggtatattctgtgtcaacttcaagataatcactcattttctcgttatattcaggtctgaattaaagttaagttaatcacaca

SEQ ID NO: 497 - DNA, 1469 bp, HOMO SAPIENS
gaaaagaaggttggaattatcgtaatttgtttctaggctgagataccagcatggagaaaatgttggagtgtgcattcatagtcttgtggcttcagcttggctggttgagtggagaagaccaggtgacgcagagtcccgaggccctgagactccaggagggagagagtagcagtctcaactgcagttacacagtcagcggtttaagagggctgttctggtataggcaagatcctgggaaaggccctgaattcctcttcaccctgtattcagctggggaagaaaaggagaaagaaaggctaaaagccacattaacaaagaaggaaagctttctgcacatcacagcccctaaacctgaagactcagccacttatctctgtgctgtgcgggggaggggaagccaaggaaatctcatctttggaaaaggcactaaactctctgttaaaccaaatatccagaaccctgaccctgccgtgtaccagctgagagactctaaatccagtgacaagtctgtctgcctattcaccgattttgattctcaaacaaatgtgtcacaaagtaaggattctgatgtgtatatcacagacaaaactgtgctagacatgaggtctatggacttcaagagcaacagtgctgtggcctggagcaacaaatctgactttgcatgtgcaaacgccttcaacaacagcattattccagaagacaccttcttccccagcccagaaagttcctgtgatgtcaagctggtcgagaaaagctttgaaacagatacgaacctaaactttcaaaacctgtcagtgattgggttccgaatcctcctcctgaaagtggccgggtttaatctgctcatgacgctgcggctgtggtccagctgagatctgcaagattgtaagacagcctgtgctccctcgctccttcctctgcattgcccctcttctccctctccaaacagagggaactctcctacccccaaggaggtgaaagctgctaccacctctgtgcccccccggcaatgccaccaactggatcctacccgaatttatgattaagattgctgaagagctgccaaacactgctgccaccccctctgttcccttattgctgcttgtcactgcctgacattcacggcagaggcaaggctgctgcagcctcccctggctgtgcacattccctcctgctccccagagactgcctccgccatcccacagatgatggatcttcagtgggttctcttgggctctaggtcctgcagaatgttgtgaggggtttatttttttttaatagtgttcataaagaaatacatagtattcttcttctcaagacgtggggggaaattatctcattatcgaggccctgctatgctgtgtatctgggcgtgttgtatgtcctgctgccgatgccttcattaaaatgatttggaagaaaaaaaaaaaaaaaaaaaaaaaaaaaaaaaaaaaaaaaaaaaaaaaaaa

SEQ ID NO: 498 - DNA, 1523 bp, HOMO SAPIENS
tggctgagttcttcctttgacaagatggcggcaggaggcagtggcgttggtgggaagcgcagctcgaaaagcgatgccgattctggtttcctggggctgcggcccacttcggtggacccagcgctgaggcggcggcggcgaggcccaagaaataagaagcggggctggcggcggcttgctcaggagccgctggggctggaggttgaccagttcctggaagacgtgcggctacaggagcgcacgagcggtggcttgttgtcagaggccccaaatgaaaaactcttcttcgtggacactggctccaaggaaaaagggctgacaaagaagagaaccaaagtccagaagaagtcactgcttctcaagaaaccccttcgggttgacctcatcctcgagaacacatccaaagtccctgcccccaaagacgtcctcgcccaccaggtccccaacgccaagaagctcaggcggaaggagcagctatgggagaagctggccaagcagggcgagctgccccgggaggtgcgcagggcccaggcccggctcctcaacccttctgcaacaagggccaagcccgggccccaggacaccgtagagcggcccttctacgacctctgggcctcagacaaccccctggacaggccgttggttggccaggatgagtttttcctggagcagaccaagaagaaaggagtgaagcggccagcacgcctgcacaccaagccgtcccaggcacccgccgtggaggtggcgcctgccggagcttcctacaatccatcctttgaagaccaccagaccctgctctcagcggcccacgaggtggagttgcagcggcagaaggaggcggagaagctggagcggcagctggccctgcccgccacggagcaggccgccacccaggagtccacattccaggagctgtgcgaggggctgctggaggagtcggatggtgagggggagccaggccagggcgaggggccggaggctggggatgccgaggtctgtcccacgcccgcccgcctggccaccacagagaagaagacggagcagcagcggcggcgggagaaggctgtgcacaggctgcgggtacagcaggccgcgttgcgggccgcccggctccggcaccaggagctgttccggctgcgcgggatcaaggcccaggtggccctgaggctggcggagctggcgcggcggcagaggcggcggcaggcgcggcgggaggctgaggctgacaagccccgaaggctggggcggctcaagtaccaggcacctgacatcgacgtgcagctgagctcggagctgacagactcgctcaggaccctgaagcccgagggcaacatccttcgagaccggttcaagagcttccagaggaggaatatgatcgagcctcgagagagagccaagttcaaacgcaagtacaaggtgaagctggtggagaagcgggcgttccgtgagatccagttgtagctgccatcagatgccggagactcgcccttcaataaaaaatctcttctagctgatcagtggga

SEQ ID NO: 499 - DNA, 3299 bp, HOMO SAPIENS
gggtgcttagccccgcccccgtcccactctgccctgttgctgtcgcgccgctgctggttgctgtccctggacccctaccatggaggagaccatcaaagatccccccacatcagctgtcttgctggatcactgtcatttctctcaggtcatctttaacagtgtggagaagttctacatccctggaggggacgtcacatgtcattataccttcacccagcatttcatccctcgtcgaaaggattggattggcatctttagagtggggtggaagacaacccgtgagtattacaccttcatgtgggttactttgcccattgacctaaacaacaaatcagctaaacagcaggaagtccaattcaaagcttactacctgcccaaggatgatgagtattaccagttctgctatgtggatgaggatggtgtggtccggggagcaagtattcctttccaattccgtccagaaaatgaggaagacatcctggttgttaccactcagggagaggtggaagagattgagcagcacaacaaggagctttgcaaagaaaaccaggagctgaaggacagctgtatcagcctccagaagcagaactcagacatgcaggctgagctccaaaagaagcaggaggagctagaaaccctacagagcatcaataagaagttggaactgaaagtgaaagaacagaaggactattgggagacagagctgcttcaactgaaagaacaaaaccagaagatgtcctcagaaaatgagaagatgggaatcagagtggatcagcttcaggcccagctgtcaactcaagagaaagaaatggagaagcttgttcagggagatcaagataagacagagcagttagagcagctgaaaaaggaaaatgaccacctctttctcagtttaactgaacagaggaaggaccagaagaagctcgagcagacagtggagcaaatgaagcagaatgaaactactgcaatgaagaaacaacaggaattaatggatgaaaactttgacctgtcaaaaagactgagtgagaacgaaattatatgtaatgctctgcagagacagaaagagagattggaaggagaaaatgatcttttgaagagggagaacagcagattgctcagttacatgggtctggattttaattctttgccgtatcaagtacctacttcagatgaaggaggcgcaagacaaaatccaggacttgcctatggaaacccatattctggtatccaagaaagttcttcccccagcccgctctccatcaagaaatgccctatctgcaaagcagatgatatttgtgatcacaccttggagcaacagcagatgcagcccctttgtttcaattgtccaatttgtgacaagatcttcccagctacagagaagcagatctttgaagaccacgtgttctgccactctctctgagtatcccaacctcttggatgtatacagagattttatagaatagaacctatagcttctaccatgagttatatgagtcaagatcctgcctaacctgaaattattagggatttactcagccctgctgccgctaacagtggagttatgtcactgatctgaaggtcactgttaagggcttctgctgccatccttgtgggttgctacctttaagtcgcataactctagctgtatcatcctctcacctgtcattcttctgagggtctcagtacaagggccctgggatggagccaacctgggtattcacaacaggcctgacttgatactaagtgattagttttccaagttgtcccactgccattcaaagtcagcccttgagtgtatttgttctcagtcctaaccctggggccagagattggtccgaggttgagaattccttcctcctcatccttggtgttgctttctccaaatgattgttttagactagccaaaaatgccgtggcaaagagctcagaaatccaatttggataccaaaggtttctcatgttaatttctcagcccccaaagaagcatcttactcctgaaccttagacaggaagtattgtttcagtcacagaaagcttttctgggtacctctggttagcactttctactctctgatatttcctatgtacatagcttttattgttgtaaatcctttcttaatggttaaataggattgttagcaactatgggtttgcagttttctgagtaggtgagttttgaatatgggtaaatcagaataatgagacaacttgttaatctctttaatactaaaaataaattactcttctatttcagggacttaggtaatttaaaataaaccttcaatttatggtcttctgttttgaagctcatgggaaaattgtgatcaaaagggctatgggaagggcagaccccgccaatgatttctcttcacctgtcttaagattaaataaaaaagagtgtcctggcagttatcttgaggtggggaaggaggtgatgaaacattagtttgtgaaatccaaggccctggcttgctttctttctttttttttttttttttttgaaacagtctctctctgtcacccaggctggcgtgcaatggcgcagttgactcactacagcctctgcctcccaggttcaagcgattctcatgccttagcctcccaagtagctgggattacaggtgtgtgccgcaatgcccagctaatttttgtgtttttagtagagacagggtttcactatgttggccaggctggtctcgaactcctggcctcacgtgatctgtccacttcagccgtccaaagtgctgggattacaagcgtgagccactgtgctgggcccgaggccctgacttcttgctgtaactttccatgcattttttttaaaaggagcagtgtggattttcgcaccctttgtgaactaagttcaatgcgctctatccaaatttgcctaattgaactataagaaagtaataattccattttctatcccctcagggactgaacaaatggaaataactcccaggcagtatcaggtggtcactacagagacttccacaaaaacttttgaatgatgtgaaacacgatgtcatgaataagggttgagccaactatagctctgtgttcctactgggctttccctaatgtggttgggagttatgccctagactaactgtattgtcctagtcacagctccttgctttgatttcatccttgataaaatgaagatgaaacttacactacttctccaagccttttgctgtcttaagaataagacctgagattaacactaaccctagaatagaaatgtaatagggagatggtaataaaggagtttttctggcaaaaaaaaaaaaaaaaaa

SEQ ID NO: 500 - DNA, 1023 bp, HOMO SAPIENS
gcagagaacgaatacgctccgttttaattcagtggcctgggctacatgggatatttaggacagactatctctctgagacagaaaaacaagggaggaggcagtatgaaagaatgtattctcgctaaattccagtttctaaaggatgtgtaagaaaccagaggtaaaggtctcgcgatatcttaagacatccggcgtagtacgcttcagtgagccacagcgctagagaagtaggagaagctcgcgagatctgtgccgttgccgaggagactaggagggggaggagaggggatctcgcgaaaggaaagaggtcgggagcgctcgcgagatctcggaccacccaacctgaaaggtgcttaggaagttgaaaggcccagaggaggcctccgggcaaatggccggagctggaccgaccatgctgctacgagaagagaatggctgttgcagtcggcgtcagagcagctccagtgctggggttagcacgggctctggttctgggactgaggggcagtcaagcagcaagatggagggggtggggaactgcagctcccggcagcctctgggctttgtgtgagtgccccgcgggctgccgggagctgtggttccgcgggcgggcagcctgggctgcgcggtctgagcgcttgttacaccccgcgcaggattcggacggagagcgcgaggactcggcggctgagcgcgcccgacagcagctagaggcgctgctcaacaagactatgcgcattcgcatgacagatggacggacactggtcggctgcttcctctgcactgaccgtgactgcaatgtcatcctgggctcggcgcaggagttcctcaagccgtcggattccttctctgccggggagccccgtgtgctgggcctggccatggtacccggacaccacatcgtttccattgaggtgcagagggagagtctgaccgggcctccgtatctctgaccacgatggcgcttacctttcagacttcattaaacttatgaccgaaaaaaaaaaaaaaaaaaaaaaaaaa

SEQ ID NO: 501 - DNA, 5986 bp, HOMO SAPIENS
gggcgcgcgagagctgctagggcggtttctctgcctcgggcctgttgggcagggccggctaaggtgcgcgtgctcgctggttctaacccttctgttgggcgtttctgcggagaggcgggaggcgctgagagtctgcgcggaggtccgtgcacagactgctttgcctgttgttgctcttcggaggcggcgatccccgaaggcgagctgaaatacggctgcaggctacaatttgcagccgacgattaaggaagacgacgagcgggagaggtggcccaccctcatggagcgcttgtgctcggatggcttcgcatttccccattactacattaaaccgtatcatctgaagaggatccacagagctgtcttacgtggtaatctggagaaactgaagtaccttctgctcacgtattatgacgccaataagagagacaggaaggaaaggactgccctacatttggcctgtgccactggccaaccggaaatggtacatctcctggtgtccagaagatgtgagcttaacctctgcgaccgtgaagacaggacacctctgatcaaggctgtacaactgaggcaggaggcttgtgcaactcttctgctgcaaaatggcgccgatccaaatattacggatgtctttggaaggactgctctgcactacgctgtgtataatgaagatacatccatgatagaaaaacttctttcacatggtacaaatattgaagaatgcagcaagaatgaatatcagccactgttacttgctgtgagtcgaagaaaagtgaaaatggtggaatttttattaaagaaaaaagcaaatgtaaatgccattgattatcttggcagatcagccctcatacttgctgttactcttggagaaaaagatatagtcattcttcttctgcagcacaatattgatgtgttttctcgagatgtgtatggaaagcttgcagaagattatgccagtgaggctgagaatagagtcatttttgatctaatttatgaatacaaaagaaagagatatgaagatcttcctataaatagcaatccagtgtctcctcagaaacaacgagctgagaaggctacaagtgacgacaaagattctgtttcaaatatagccacagaaataaaggagggacctatatctgggacagtgtcttctcagaaacaaccagctgagaaggctacaagtgacgagaaagattctgtttcaaatatagccacagaaataaaggagggacaacaatctgggacagtgtctcctcagaaacaatcggcccagaaggttatatttaaaaagaaagtttctcttttgaatattgccacaagaataatgggcggtgggaaatctggaacagtgtcttctcagaaacaaccagcctcaaagactgcaagtgacaagacagattctgctttgaatacagctacagaaataaaggatggactacaatgtgggacagtgtcttctcagaaacaacaagccttgaaggctacaactgacgaggaaggttctgtttctaatatagccacagaaataaaggatggagaaaaatctgggacagtgtcttctcagaaaaaaccagccttgaaggccacaagtgatgagaaagattctttttcgaatataaccagagaaaaaaaggatggagaaatatctaggacagtgtcttctcagaaaccaccagccttgaaggctacaagtgtcaaggaagattctgttttgaatatagccagagaaaaaaaggatggagaaaaatctaggacagtgtcttttgagcaaccaccaggcttgaaggctacaagagacgagaaagattctcttttgaatatagccagaggaaaaaaagatggagaaaaaactaggagagtgtcttctcataaacaaccatccttgaaggctacaagtgacaaggaagattctgttccgaatatggccacagaaacaaaggatgaacaaatatctgggacagtgtcttgtcagaaacaaccagccttgaaggctacaagtgacaagaaagattctgtttcgaatatacccacagaaataaaggatggacaacaatctggaacagtgtcttctcagaaacaaccggcctggaaggctacaagtgtcaagaaagattctgtttcgaatatagccacagaaataaaggatggacaaatacgtgggacagtgtcttctcagagacgaccagccttgaagactacaggtgatgagaaagattctgtttcgaatatagccagagaaataaaggatggagaaaaatctgggacagtgtctcctcagaaacaatcggcccagaaggttatatttaaaaagaaagtttctcttttgaatattgccacaagaataacgggcggtgggaaatctggaacagagtatcctgagaatctgcgcaccttgaaggctacaattgaaaataaagattctgttctgaatacagccaccaaaatgaaggaggtacaaacatccacaccagcagaacaagacttagaaatggcatcagagggagagcaaaagaggcttgaagaatatgaaaataaccagccacaggtgaaaaaccaaatacattctagggatgaccttgatgacataattcagtcatctcaaacagtctcagaggacggtgactcgctttgctgtaattgtaagaatgtcatattactcattgatcaacatgaaatgaagtgtaaagattgtgttcacctattgaaaattaaaaatacattttgtttatggaaaagattaataaaacttaaagataaccactgtgagcaacttagagtaaaaattcgaaaactgaaaaataaggctagtgtactacaaaagagaatatctgaaaaagaagaaataaaatcgcagttaaagcatgaaatacttgaattggaaaaagaactctgtagtttgagatttgccatacagcaagaaaaaaagaaaagaagaaatgttgaagagttgcaccaaaaagttagggaaaagttaagaataacagaagagcaatataggatagaagctgatgtgacaaaaccaattaaaccggctctcaaatcagcagaggtggaattgaagacaggaggaaataattcaaatcaggtttctgaaactgatgaaaaagaagacctgctgcatgaaaaccgcttgatgcaagatgaaattgccaggctcaggctggaaaaagacacaataaaaaaccaaaacctggaaaagaaatacttaaaagactttgaaattgtgaaaagaaagcatgaagaccttcaaaaggctctaaaacggaatggggaaacattagcaaaaacgatagcctgttatagtggacagcttgctgctctgacagatgaaaacacaacgctccgttccaaactggagaagcaaagagagagcaggcaaagactggaaacagaaatgcaatcataccgttgtagactgaatgctgctcgatgtgatcatgatcaaagtcactcatcaaaaagagaccaagagcttgctttccagggcacagtagataaatgtcgtcacttacaggaaaatttgaattctcatgttctgattctttctctgcaactttctaaagctgagagtaagtccagagtcctcaaaactgagctccattacacaggagaggctctgaaagaaaaggctttggtttttgaacacgtgcaaagtgagctaaagcaaaaacagagtcaaatgaaggacattgaaaaaatgtacaaaagtggatacaatacaatggaaaaatgcatagaaaaacaggaaagattttgtcaactaaaaaaacaaaatatgttgcttcaacagcaactggatgatgctcgcaacaaagctgacaatcaagaaaaagcaatacttaatattcaagccagatgtgatgctagagtacaaaaccttcaagctgagtgcagaaagcaccgtcttttactagaagaagacaataaaatgttggtcaatgaactgaatcattcgaaagaaaaagaatgccaatatgaaaaagagaaagcagaaagagaagtagctgtgagacagcttcaacaaaaacgagatgatgtcttaaacaaaggatcagcaacaaaagctctgctggatgcttcatcgcgtcactgcacctatttagaaaatgggatgcaggattcaaggaagaaattagaccagatgagaagtcaatttcaagaaatacaggatcaacttacagctactataagatgtactaaggagatggaaggcgacacacaaaagcttgaagtagaacatgtgatgatgagaaaaattattaaaaaacaggatgaccaaattgagcggcttgagaaaatcctgcagcattcaagtttgatgctgcaggtgtttgagagctagatgaagcatccagccaaactagactacatggagctccacagtgatcgtcttcacctccagctgtttgcatttacttcttccctctatcctacatgtgttttccttccccttcagatatcaacctatgaattgcctctaccaaaaagcctacaatattgacacaaacctgggctagtatcccttctatgtcttccaataagtgctgtcttatgcttgtcattgtatgtatgactctgtatgggaattgcctgtttgttttttcagattatagcatacagttgttgaggggcggaccgtatcatctttatcttgtaattccagtgcttgtcctagtaccttagcacatggttgctgaatacatgaacgaagagtgagaaaccagaagctctgatacttaactgccatgataatgaattcggtgtgcaactatgggcaaattatatttaatagtaattgcatattgtacatatttttcattcttattaacactgataagcttttcagcatatactgactttctcttagttaactgtgaaatcatttagataaagaatataattctttttcattctaacttctgaatttaaatctgaatcctctatagcaggggtccccaactcccaggccacacacagttccatgacctgttaggaagcaggctgcacagcaggaggtgagtggcaggcaagcgagtgaagcttcatctgtatttccagccactccctgttgctcacattatcacctgagctctgcctcctgtcagatcagcaaagccattagattctcacaggagtgaaaatcctactgtgaactgctcgttcaagggatctaggtcacatgctccttatgagactctaatgcctgatgatatgtcattgtctcctatctcttcacgatgggaccatctagttacagaaaaacaagctcaggactcccattgattctccattatgatgagttgtgtaattatttcattatgtattacaatgtagtcataataggaataaagtgcacaatagatgtaatacgcttgaatcaccatcctgaaaccatcccccaaacccccatctgtggaaaaattatctttcacaaaactgctgcctggtgccaaaaaggctggggactgctgctctatagcttctgcactagaatctactaatgagtaaaatttaaatcaataactagttttaaaagcataacaagaatatgtgctgtctggctgcagtggctcatgcctgtattctcagcactttgggaggccagtgcaggtggatcacttgaggtcaggagttcaagaccagcctggccaatatggtgaaatcctgtctctactaaaaatacaaaaattagctgggtgtggtggtgcatgcctgtagtctcagctactcgggaggctgaggtgggagaatcacttgaacccgggaggcagaggtttcagtgagccaagatcgtgccactgcactccagcctgagcaacagagtgactccatctcaaatgcaaaacaaaacagaaagaatacatgctgacgaaaaaaatctaagacaataaaattgtattactaggctgttaacatgatattttgtttcccgttaaatgtgtgacatgcaaaagtatttattaaatgaaaatattttttatctttt

SEQ ID NO: 502 - DNA, 4158 bp, HOMO SAPIENS
ggcgcgtcccgccagcctgccctcggccgcaggcgactggacggcggttacggggcggtcccagcgccaccacgactggctgtcggctccgccagtcatgggctgatgacgccccggggctggctccgcccctagcggcagccccgcctcccctccagagcctggtcggcttagccctgctttccgcctcactcgttgagcaggtccgtgaattgtcagcgcgctgtgggcgactgtgtggccgcggcggccgccaggcttgccgcactccccctgaggtgcccgccggaaccaatgtgccctggtccactgggccgtgagcagccaccgactgggggcaacttggcacttagaaccgcagcagggacgtcggtttgctatcgggactcggcgaggacgatggaaatcctgtatgaatgtggaagccattagcagagtaattgctgtctgttaccatgacaaccagccgctgcagtcacctgcccgaagtcctgccagactgcaccagctcagctgcacccgtggtgaagacggtggaggattgtggcagcctagtgaatgggcagccgcagtatgtcatgcaagtttcagccaaggacgggcagctgctgtcaacagtagtgcggactcttgccacccagagccccttcaatgaccggccgatgtgcaggatctgccacgagggcagcagccaagaggacttgctctctccatgtgaatgtacagggaccttggggacaattcatcggagctgcctggagcactggctgtcatcctcaaacaccagctactgtgaactctgccacttcaggtttgcagtcgagcgcaaacccaggccgttagtggagtggctgagaaaccctggcccccagcatgagaagcggactctgtttggcgacatggtgtgcttcttgtttataactcccctggccaccatctcgggctggctgtgcctgcggggcgccgtggaccacctgcactttagtagtcggctggaagccgtcggactgattgcactcactgtcgcactcttcactatttacctcttttggacactagtgtcatttaggtaccactgtcgattgtacaacgagtggcgtcggaccaatcagagggtgattctcctcattccaaagtctgtcaatgtaccttctaaccagccgtccttgctgggcctccattcggtcaagaggaactcaaaggagacagttgtttgatgtttgtatggttggttggttgtttgattcattgtttggggtttggaagtgtctgcactggggtcatgcactgagcgacccccaagcccttccttaagcctgtgggtctaagaacatccagagcatattagcacatcactccaagcaacaacctccgccagaagaaagcaaatgctgttttacttcaaatgatggatgctgcaatcatatgatatttgctaagctgccaaacatgtttatttagcagatactgtatggaattttctgaacacctctttaacgtatgaggaaggttgtcctgctacggatgcaattcaattcttccttttttattactatttcaaacacacacacatatatatatatattaaacttagatgataatcaaaatcaaaaagtcaacgtaaaaactggtttcttggtttggttgggtcttatttgagttagtttgtttctcagtttctcgtatggattctttggggtactttggtagcctgagtggtctttttcatctctttcgcgtccattactcaaggagacagcataacagatgcagaacaagtcatatttgaagaatgttttgtactaaacttcatttaattattcagtttttaaagggaaaaagggcgtgagctcacacagtgagctgtttatttaaatatcattaaggagaaaaaaaaatatggtgagaagctcgctcctttcaacttgtttggtactgacagctgatagaagctattttctaataataaacatccagtgtgtgaaagacaaaacccactgattgcaatactctttttttaatgataaaacctgtgaagtttcccaaagcaggttttaaaaggaaaaaaaggaaaagcaaaaaggttgctgttctcactcccatctcatttagtgcatgtcttaattcgggattcgtaatgaattggaggatcattagacatttctaggaaccctagacctgttttgcatgtcaattagcattcccattgctctattgaatttctagcttgacaggtagatgtggcaaaaaaaaaaaaaaaaaaaaaagcctgtcctagcagccctgcacttattctaagacccctttgtctgattctttaaaaaggagccccacacagtgccttcccccaaccatgagccaattctgtcacagtccgaaatagactttttctaagggtttcgtgtccctcttttatccgtcgcagtgtaaagggtctgatccgcagcctgcattgtgcgcgcaccgaggcaggagcggatgtcttctgaggagagcgctggctggggttgactctcaggctcccggctgtccgcccgcccacacgcagcgaggaggggcggagccctgcttccggaatgcttaaaatatggaattctagaacatgacccacattctgagtatcactccagcatctgccttgtgttccaagtgggaaaacgagaagtgcaaaggaacaggcagcgaggagggtagcgatttttgtctgcaaattgatggagctgatgcaggtgtcccctttgtaggcgagccctccattcactggctgctcccagcgctgcctggggagggaaacagctgtactgctctccgctgcaaaactcagatgtgctttatggcttgtgacaatagatttcctccccaccacgcttcactgggacacttcaattccagtaatatatgtctcagcccttctgtttactgcgccctgctcacccccctgggctgtcattagctgcaccaccatcaaccgtttcttaattgacctttttaaaatgctggacatcaccggctgcacgcagctgccacacattaaatttccagagcaaagagtccaacttggtagctggtgaattgcagccctgtaatatacttaataaatgacgtccacccagccttagtccctgagctgtcaggtgaacccgtgacacgtctcaactgaatggcacaacattcatgagaggaccataccccttctccctgtttcttgcatgaattaaggaagcagcggatttccaggatgatttcctgtcaaggttggctgcagagaattcctgccatcttggttcatgagatgagatatgacatcatcaaaggcagccaggtcccaggccgttcaatggggatcctgcattaggaagggtttgcacattaaaactgtgcctgtgccacacctctttccttcgtgtttgcatccctgccctgtgaagtaaaacagagtccaagatgcaaggagtagattgtgtgtggggtggtgaaaggacacccctggcagccaggcagagcatcagtgcctcccttcccaggtcaccagcttgggacctccttgtgagaggctctgatctccatcagcatcagggcccataggggattctgaactcttggaggatatttcatcccctccaagccttgccccatggaaagggctacacctcctgcaggaaggggtgccttttgttaacaggtattaatgggtacagaggcaccatgcagcctaccagcacccttgctagcctagtcctcttcctgtgcttctttttgaaagatcaagaatgaagaggaagagatgaggagtgggggtcctttacctaaaggaccctcgtggttcattgcttctctttaactgactttttaaaaaaactccctcttccacactccttgctgtgattctgtcctaatcatttttcttgagaatgtcatgtagagataaatgtgtgtcacagtgaagccagaaggtgaattaacaactaagacaaatccagcatgctcttgcctgccctgcatatgtgctcatttggggaaggacggaggacacagagcatcgacacaaattctacagctcctcagagaacacagcagagactcagatgagctgtaaaatccattaaggaaaaataaatggcatgatttggaagttaaaaaaaaaaaaaaaaaaaaaaa

SEQ ID NO: 503 - DNA, 3591 bp, HOMO SAPIENS
agttggttcccggaggcagaatctgttaaactgacaaagcccacgtctccgggtccctgtctcggggagtcgggactattgggtcaccccgggtagtcgagactctagactgagctgtctcggtcactcaggaggcagttggcagagtattcgtggtcagggaggtgacccgtggtcagcagggtcaggccacccagggacaaagggtgctcctgcaccgggccttggagaaggacagagcggtggggacttggggtcagcgggggagcctccgcggatggggagtcaccacctgccggcaatcagccatgactgcctttgcactgtccatgctctcagcccaccacctcctccccctgccattgcagtggctaacactggagacgaagaccaagacaccacagcctttctccagtacctctcaaatcagcacagacaaggacaaaggcctcaatccacaactgctgaagatggaccctggccacatgggatggtcagacacgcctgcccagctatctgcaggcgaagaggctcagaagaggtttaggggcctgaaggacatcttgcttccatgtccatatgagcaggctatttctgctccatgagtcaattttgccatataaaatacttaatttcagccattccagggtgctataggatgcacagcttcccatcagcccacctgaactccagccatgccattttaataccaggaataaggtcacctgctttcctgccccttaggaggccggagccgtggaagcaaaatggcacttctgtttacctgttatattatttttttgtcatccttatatgtttgaaaaatgcaattatatgaaaaaagtttagtaattacagacataacagcagaaagtcctcggaaccaagcttattctcatggccgattctgctccacctgggactctgctgtgctgcgggcatcctgtggtcagaatcgcagaggggccatcagggaggaccttcccagaggatggacctcacgtgactgctgcgtgggcaagtggcactggccactctgcctggagagaggagtaaatgcagggctggccaggcgacctgcacactctgctaccggccttgtccatctttagcctctaatttgaaaatgaggatcacacagaccaagagtatctttgagggttagtacagaccacagaaatgccctgggcctttcactctctccttttgcaaattcccatgtgtggaaatgccgtttggataatgagggagcctgaaggaggtggacacatgagcagccccgacaggcctggctccatcctctgaaaatggggccccgtgcccggcgtgtggccttactggttcagtcttctttacagtggtaggttttgagtgcccagatgcccagtgcctcctacccggaacaggacaggaccaggctgtcccctggaagaatcccatgcacacttggctattcagggagtttccacccagccgagctcgcctctgtggctaccctggtcttgctgctcatatctgccaggaaaggcctggacttggagagaaacctgggatttggattcagtccttgccagcctggctggttcatatccttacctctgtctgtggaagcctatgttcctgagcagcgagtcagagggggcatctgaacgcagagcagggagcttcagatgggaagaagtcagaggaaccagaatgtatcagacgatgtggagttgggtgcctgagctcaaagcaagctgggccttgggctggctgtgtgatcttgggcaagttcgaccagcttctttgtgcctcttttctctccttaataagataaatgtcttcactagtacactgagggctgccattaagttctatgtgcagggatccaaggcaggccctaggtctcttggtgagtgctactcctccttacaatttgctgcccggagcaacattgggtgacagaacttcttagcaccttggcagtccttgtcctcctggaccctctgttttgagggtggaatgaggtgaagggcaagtgctttcccagctggtcaggtgctctaccaactgggcatattctaatccccccagagtatacagatcagagtttgatgtggccaatgggtccaatgcccaagtgagaatctcttgatgaagttattggtgtggggttttgctttggtttttaattatagagagcaaaagtattgaaagtattacatttaccctaaaggtgtaagcaagttatggtcaagtgaagatgaagtaccatcctcaaacacgggttccattcttagctcatctcatttaaaggagagaaaagccttgcaggtgaaacatggtgggggtagacaggggttcagccaatttcagtgtttggccccaagaagtgaatttgggtttgaggacctctctctggaaggattttatgaccagatcttcctggagatgatattagaagcttttctcaccaaatatttatttgcctggggtgcaacttctgcttcattctctctttgactccagctgtctttttggactgaagtgcaggttgctcacagcatcctacaaagtaactgtcttcccaaatctcacttacctctgagtttctgctgtattcctgtctttctctctctctttttgaactggaatctattactttggatgatgcatgctggcgttttctaaagttttctgattgattgtgtctttaaaaaataatctgatagtattttagcttcttgaattttgtggcatatttttaggcctctcctaaacccatttttgagtgctatgacattgttcatgtatgaagttatgccagtagaaacaaaatgctgtcatataggctcccctaaaacttcaaatctggtccagatcttagactggcagcttctgctgtcattggatctcagtgagacctttgcacccatttcctccctttgtgattcatccacggacatccccatctccttgagaacaatctcaggaatattccttgccttctttcggctctcactccatctcattttctgctgttcactcgggaataaagagatgtcccacactttaaagagtaaaaacaaaaattggagctcagagagggtgaacttgtcaatatcacacagagctgggagtgtggtaagcccttgaaatggggctcaatgacaccgctacctcccagggattcctaatgtctgagggttccagtgagctgagatgaacccagggcctaagaagaactctctgacctcctcacctccaaagccccacccagtgcacatggcctgaggcgtccatggtgatggtaaagaaacctcacctgccatctctcccattactgccatgtcccctctcatcctattctgtgccaaatgtccagatgtgatcaatagaatcaggagaaaattgaggcctgaggggagggggccagactctgggagtggagagtggattgaagtcagactagggctgttcagcaaggagttcagggccttcaagtgttgggagcttggcagcaatgccaaggggaatgggggtggatttgggtccaagtttatgttcgaagaatataagcatgatttggagactcctgatgttcatatg

SEQ ID NO: 504 - DNA, 2970 bp, HOMO SAPIENS
ggcctctgtaaggagacttggagtcgctgcagccaaggctggagccatgagacggccccctggcaatggagaggcggccagcgaaggtccaggtggctggggtctatggggagtccaggagtccaggaggctgtgctgtgccggtcacgaccgctgcaagcaggctttgctgcagattgggatcaacatgatggcactgcctggaggtcgccacctggactccgtcaccctgccgggtcagcggctacacctgatgcaggtggactcagtccagcgctggatggaagatctgaagctcatgaccgagtgcgagtgcatgtgtgtcctgcaggccaagcccatcagcctggaagaggatgcacagggtgacctcatcctggcaggtggccctggccctggagaccccctgcagctgctgctcaaacggggttgggtcattagcacagagctgcgcaggatcgggcagaagctggcccaggaccgctgggcacgggtgcacagcatgagcgtgcgtctgacctgccatgcccgctccatggtcagcgagtacagtgctgtcagcaggaactccttgaaggaaatgggcgagattgagaagctgctaatggagaaatgctcggagctctcggcagtcacagagaggtgccttcaggttgagaatgagcatgtcctgaagtcaatgaaggcctgcgtgagtgagaccctgagcatgctgggccagcactttggccagctgctggagctggccctgacacgggaggttcaggcactggtgagaaaaattgatgcctcagacaatatctacaccacagagtccaccacagggaacctgttcagcctgacccaggagggggctcccttgtgccgcatcatagccaaggagggtggggtcgtagcactcttcaaggtttgccggcaggacagtttccggtgcttgtacccccaggcgctccgcacgctggcctccatctgctgcgtggaagagggtgtccaccagctggagaaggtggatggcgttctgtgcttggccgacatcctgaccgacaacagccactcagaggccacacgggctgaggctgcggctgtggtggcccaggtcacctccccacacctgcccgtcacccagcacctcagtagcttcctggagagcatggaggagatcgtgacagccctcgtcaaactgtgccaagaggcctcatcaggggaagtcttcctactggcctctgcggcccttgccaacatcacgttctttgacacaatggcctgcgagatgctcctgcagttgaatgccatccgtgttctcctggaagcctgcagtgacaagcagagagtggacacgccttacactcgggaccagattgtgaccatcttggcaaacatgtctgtcctagaacagtgtgcctctgacatcattcaggaaaatggggtccagcttatcatgggcatgctgtctgaaaaaccaaggtctgggactcctgctgaagtggcagcctgtgagcgagtccagcagaaagctgcagtgaccctggctcgtctcagccgagacccagatgtggcacgggaggccgtgcggctcagctgcatgtcccgtctcatcgagctctgcagatccccatcagagaggaacagcagtgacgccgtgcttgtggcctgcctggctgctctgcgtagattggctggggtctgccctgaaggcctccaggactctgactttcagcagttggtccagcctcggctggtggactccttcttactctgcagcaacatggaggagagttttgtgtagtgagtgtgggcgaagaaatacatttggctgttctcacaccccctctgactatgcaccagtgaacacatctgagtacataccagctctcctcatcttcttatttatacttaacttatttttgtgtgaaataaatggaggacaaaatcttagagcaacatcatcaaacagtctttggtccttgagaatcttctttgtgttttattttttgatttctgtagcttttcagttgcagatgttgaaattcgtaatgacaaatatgacaaattgtcatgggtgattccacttcatcttattttttctactctcactatacaatcttgcctcattttttaaaactttggaaccagaggatttcaactgcctagcaagttttttttttaagttggatttgctcttcccaaaaatctaaaatgaatttaataattgggtagaatatattggaaagaagtttctttttctttaataaatggaatcatataaaatgtatcccggattttcttattaaattgtattttaaactaggttcttgcttcccaggtttcattccccaaaaacttttccaaccattaaaagtacacacagaattgtcttgttttcataggtgtataaataggttaagttctgagtgacttagtgagaaaccaaagtgactttcaaaaatacacccaaaggcaccagaaaccctgcttcctttggcttctttgcttttgtgtaacctcctgttcacctcctggtgaatagaatcctcagatgaggcttattgaatgattgattcctcctcaaaagtatacttgaaagcagtggtgtgctgaagccagctcatgcccactcacaagggacaactgtgagaatttcttcctaactctgcactcagtgaccttgcgttggtagccatgagctacttcatgagccctcatgttgaaattggccatagtgggagtatttacaccacagaaattcacagatgctataaagcacagctttcgctttttttttttttagagagagctggtttaccaatttcactgcttgaaagtatcacaaaaatctggggatccttttgaaaatataaatgccatcatattgtgatataatttatacaatataatataattgtgtaaaatcatgattataataatgtttcaataaacatttcttaaattcccaaaaaaaaaaaaaaaaaa

SEQ ID NO: 505 - DNA, 472 bp, HOMO SAPIENS
cctttcccgcgcgaccggcgagggaggaagaagcgcgaagagccgttagtcatgccggtgtggtggcggcggcggagactgcgggcccgtagctgggctctgcgaggtgcaagaaagcctttgaggtgaaggtgtatgaaagtcatcataacagatgttttccaaaaacttgtagaaggttgtgaaaaaactactaggatcacgcggcatgtattgagcatataggttgctgtagatgaatgttcttagctgtcatgtttaaaaatacttctgcttcgttacctcaagtgtggcatgcagcattttggaaggaaaattgaagacgtgttcaagaaaacatgaacagaagcaaatgatgaaaatgagcattttacttgatgttgataacatcacaataaattatggagaaaaatacatatttggctaacttttaattgctgaacaataaagtgttttcttttaaatcaactct

SEQ ID NO: 506 - DNA, 9239 bp, HOMO SAPIENS; identical to SEQ ID NO: 492

SEQ ID NO: 507 - DNA, 8672 bp, HOMO SAPIENS
gaatcggttcccgggtgatcctcgcgcctgccgctgctcggccgccgccgctgacgaggagctgcagcgcgccgggccgaggcctcgagccgccccgggagctggagctgaaggcgccgcgcggagcgcgcacctcagccctgagcccggcggcggcaggcgtcgctgtcttttctccttttccccaatatggcagcggcggacggcggcgggcctggtggggcctctgtggggactgaggaggatggcggaggcgtcggccacaggacggtgtacttgtttgatcggcgcgaaaaggagtccgagctcggggaccggcctctgcaggtcggggagcgctcggactacgcgggatttcgcgcgtgtgtgtgtcagacacttggcatttcacctgaagaaaaatttgttattacaacaacaagtaggaaagaaattacctgtgataattttgatgaaactgttaaagatggagtcaccttatacctgctacagtcggtcaatcagttactactgacagctacgaaagaacgaattgacttcttacctcactatgacacactggttaaaagtggcatgtatgaatattatgccagtgaaggacaaaatcctttgccatttgctcttgcggaattaattgacaattcattgtctgctacttctcgtaacattggggttagaagaatacagatcaaattgctttttgatgaaacacaaggaaaacctgctgttgcagtgatagataatggaagaggaatgacctctaaacagcttaacaactgggccgtgtataggttgtcaaaattcacaaggcaaggtgactttgaaagtgatcattcaggatatgttcgtccagtaccagtgccacgcagtttaaatagtgatatttcctattttggtgttgggggcaagcaagctgtcttctttgttggacaatcagccagaatgataagcaaacctgcagattcccaagatgttcacgagcttgtgctttctaaagaagattttgagaagaaggagaaaaataaagaggcaatatatagtggatatattagaaacagaaagccctctgattctgttcacattacaaatgatgatgaaagatttctacatcatcttatcatagaggagaaggaaaaagatagctttactgctgtggttatcacaggggtacaaccagaacacatacagtacttgaaaaattatttccacctttggacacgacagttagcgcatatttatcactactatattcatggcccaaaaggaaatgaaatacgaacatcaaaagaagttgaacctttcaacaatattgatattgaaatttctatgtttgaaaaagggaaggtacctaagattgtcaacctaagggaaatacaagacgacatgcagacgttgtatgtaaacacagcagctgatagttttgaattcaaagctcatgttgaaggagatggtgtagtggaagggattatccgttatcatccattcttatatgatagagaaacttaccctgatgatccatgctttccatcaaaattaaaagatgaagatgatgaagatgattgtttcatacttgagaaagcagctagagggaaaaggcctatttttgaatgtttttggaatggacgattaataccatatacatcagttgaagactttgactggtgtactcctcctaagaagagagggcttgcaccaattgaatgctacaataggatatctggtgcattattcactaatgacaaattccaggtcagcacaaataaattgacgtttatggatcttgagctaaaattgaaagataagaacaccctttttacaaggattttaaatggacaggaacagcgaatgaaaattgacagagaatttgctttgtggctgaaggactgtcatgagaagtatgataaacaaataaaatttacactttttaagggagtaattacacgtcctgatcttccttctaaaaagcaaggtccctgggcaacatatgcagcaatagaatgggatggaaagatatacaaagcaggacagctggtcaagacaatcaagacacttcccctcttttatggaagcatagtaagattttttctttatggcgatcatgatggagaagtatatgctacaggaggagaggttcaaattgcaatggaacctcaggcactatatgatgaagtaagaactgtgccaattgcaaagctggataggacagttgctgagaaagctgttaaaaaatatgtagaagatgaaatggcaaggctccctgatagattgtcagtaacttggcctgaaggagatgaattattgcctaatgaggttaggcctgctggaacccctattggtgcgttaagaattgaaatactgaataaaaaaggggaagcaatgcaaaagcttccaggaacaagccatggagggtcaaagaaactcctggttgagctcaaagttattttacattcttcaagtggaaataaagagattatttcgcatattagtcaacatggaggaaaatggccttactggtttaaaaaaatggaaaatattcagaagttggggaattataccttgaaattacaagttgtgttgaatgaaagtaatgcagacacttatgcaggaagaccactaccatctaaagcaattaagttttctgttaaagagggtaagccagagaaattttcatttggtcttctggatcttccttttcgtgttggagttccatttaatatccctctggagtttcaggatgaatttggtcataccagtcaactagtaactgatattcagccagttcttgaagcaagtggtttatctttacattatgaagaaataaccaaaggaccaaattgtgtaattcgaggtgttacagccaagggccctgtaaactcttgtcaaggcaagaattataatctgaaggttactctgcctggcttaaaagaagactcacagattttgaaaattagattactacctggtcaccctcgtcgactgaaagtgaaacctgattctgaaattttagttatagaaaatggaacagctttcccatttcaggtggaagttttagatgaatcagacaacataacagcacaaccaaaattgattgttcattgtaagttttcaggtgctccaaaccttccagtctatgttgtagattgcagtagttctggaaccagtattttaacaggatctgcaattcaagttcagaatattaaaaaagaccagacgcttaaagcaagaattgaaatacctagttgtaaagatgtggcacctgtggagaagactattaagttgcttcccagtagccatgttgcaagactacaaatattcagtgtagaaggacaaaaggcaattcagatcaaacatcaggatgaggttaattggatagcgggtgatattatgcataatcttatttttcaaatgtatgatgaaggagaaagagaaatcaatataacatcagctttagcagaaaaaattaaagttaattggactcctgagattaacaaagaacacttgctacagggtctgcttcctgatgtgcaagtaccaacatctgtaaaagatatgcgctattgccaggtttcattccaagatgatcatgtgtctttggaaagtgcgtttacagtaagaccacttcctgatgaacctaaacatttaaaatgtgaaatgaaaggaggaaaaacagtacagatgggccaagagcttcaaggagaagtagttataataattacagatcagtacggaaatcagattcaagcattttcaccaagttctttatcttctttgtcaattgctggggttggacttgatagctcaaatttgaaaacaacctttcaggaaaacacacagagtataagtgtaagaggcatcaaatttattccaggtcctcctggaaataaggatctttgttttacttggcgtgagttttctgactttattcgagtgcaactaatttctggacctcctgctaaacttctccttatagactggccagaactaaaggagtccattccagtgattaatggaagagatttacagaaccctattattgttcaactttgtgatcagtgggataatccagcaccggtacaacatgttaaaataagtcttacaaaagctagcaatttaaagctcatgccttcaaaccaacagcataaaacagatgagaaaggcagggctaatttgggagtattcagtgtttttgcccctaggggagagcatactcttcaggttaaagccatctataacaaaagtatcatagaaggacctataattaagttaatgattcttccagacccagaaaaacccgttcgtctcaatgttaaatatgacaaagatgcatccttcttagcagggggtcttttcactgattttatgattagtgttatttctgaagatgacagtatcattaaaaacattaatccagcacgtatttccatgaaaatgtggaagctgtctaccagtgggaaccgacccccagcaaatgcagaaacatttagttgtaataaaataaaagataatgacaaagaagatggctgcttctatttcagggataaagtaattcctaataaagtggggacatattgtatccagtttggttttatgatggataaaacaaatattctcaacagtgaacaggttatagttgaagtcctgcctaatcaacctgtgaagttagtacctaaaattaaaccacctacaccagctgtttcaaatgttcgctcagttgccagtaggaccttggtcagagatctacatcttagtatcacggatgactacgacaaccatactggaattgatttggttggcactataatagccaccattaaaggctctaatgaggaagatactgataccccactttttattgggaaagttagaacacttgaattccccttcgtgaatggttcggctgaaatcatgagtctggtgctggcagaaagtagtcctggaagggatagtactgaatattttattgtatttgagccccggctaccacttttatcaagaaccttagaaccatatatcctaccgttcatgttttacaatgatgttaagaagcagcaacaaatggcagcacttacaaaagaaaaggaccaattatctcagtctattgttatgtataaaagtttatttgaagccagccaacagcttcttaatgaaatgaaatgtcaagttgaagaagcaagattaaaagaggcccaattgcgaaatgaactaaaaatacataatattgacattcctacaacacaacaggtgccacacattgaagcacttctgaaaagaaagctatcagaacaagaagaactgaagaaaaaacctagaagatcgtgtactcttccaaactatactaaaggcagtggagatgttttgggaaagattgcacatctagcacaaattgaagatgatagagctgcgatggttatttcttggcatctggcaagtgacatggactgtgtagtcaccctaaccactgacgctgcacgtcgtatctatgatgaaacccaaggtcgtcagcaggtgttgccccttgattctatttacaagaagactcttccagattggaaaagatctctacctcatttccgaaatggaaaattgtattttaaacccattggagatccagtctttgctcgagacttgttaacatttccagataatgtagaacattgtgaaacagtatttggtatgctgttaggagacaccattattttggataatctggatgcggccaatcattatagaaaagaggttgttaaaattacacactgtcctacactgctgaccagagatggagatcgaattcgaagtaatggaaagtttgggggccttcagaataaagctcctccaatggataaacttcggggaatggtatttggagctccagttccaaaacagtgtctgatcttaggggaacaaatagatcttcttcagcagtatcgttctgctgtgtgcaaactagacagtgtgaataaggatcttaacagtcaattagagtaccttcgcactccggatatgaggaagaaaaagcaagaacttgatgaacatgagaaaaatctcaaactaatagaggaaaaactaggtatgactcccatacgtaagtgtaatgactcattgcgtcattcaccaaaggttgagacgacagattgtccagttcctcctaaaagaatgagacgagaagctacaagacaaaataggattataaccaaaacagatgtatgagaggtgacagagagaagaggccattggtctcagtaagaatgccctgctttctgcatctctgtttcagaagaccaagagggtgacttaccagactgagtatttctggggacaatacaagtacctgggcatgaatttccatttcgattcagatgggactggaaacaaccattcaattttatgaatcttactggacattatggatttactggaattattccagacattatgccctttggttgtcactaccttgcaaatgtgtaagaggaaaatgtgctaatgtggcagtgactgtaaaactggcacatggcatttattaatcctgaagaaaagtacatgtactatttttcagtataaatataatgaacatgtcagaactatttcttgaaaacctttttattacttttgcgtgaatttatttaacaaagatgttttgtcttttgtgtaagggaggttctagaggctagatgtttaattgtaaatatgtgaggaaactcaatgcagaattcaggataaaaattttaaaagcacaggtatttgggaattgaaatgttaagatacccagaacaacattaaatcaatgagtgaacttgtgacagtggtagcatttcaaatttcaaaagacttatcctgtgtgtgtgtgtgtgtgtatatatatatatatatataaatatatatatataaaatattcagcagcaccaagttttataactattgtttgtttgactttattaatactagaatatgtagtctcagccttaattttacatttacattattttgtaattttttattactatttttaaggggttaaagagaacatacattctcacattagtgtactttctggtagaaagttgctgcaaaaacatttgaaatgtatattaacctaatgtatgtcatatatatgtctttgtgtaagttcaagactattgatctgtgaagttattttgtaaggacatacatttggtaagtaagtttgtgtcccaggaaatgtatgtgtttttaaaccctttctaaatatgcaggccattaataaataagattgtttcttccctactgaatagataagtgtttttcttttttaaaattggaagcttcataaaagttatcttgttaaaaaacgatgatgatgttaacctatctatctttataattggaaattatttaaactgtttgttgttacagaagaaacaaaatggtaattacagaattagctgtggggaagattggctcccatggtactacaggttgagtatcccttattcaaaatggttgggacctgaagtgttttggattttggttttttgtggggtttttaaattattattttggaatatttgcattatatttaccaatttagcatccctaatccaaaaatctttcattagaaattggaaatgcttcaatgagcatttcccttatgtgtcatatctgcgctcaaatgttttgaattttggaacatttcttgtttctgacttttagattagggatactcaccccgtaccaatatttggagtccttagacattagattatatgaaaatgattgattgataggtaagaaaggttaaagagaaatgactttttaggaactagacttgaacgtataattaatatgtggaactagtttgcttttataattcattgtatcaagaaggagtcatgttttaaatccaaggcattgagactatctagaagcaaaaaagttggttttaaaaattctttttattagaagtgtgtttaaaaacatgtctttttttcccttgagcgacagtggcctcactacattgcccaggctagtcttgaactcctgggttcaagcagtcttcctgccttggcctcctaagtagcagggattacaggcatgcacccacatgccaatttttattgcttaaaatggcgagttctatggatattatctagccccaagcccatatctgtacacttttgttcattttataataccagaaagaatgttctatcagtaaaagaaggtttttaagtatgaatctccatttttgtggagtttttctaccctgtaaaaattaactttgtggttcccagtaattacagtaaggagtttttctatattttcacagttggatttatctaaggatatttctcagcatattaaggaatccttttctacatttgagcaaatactgaggttcatgttgtaccaaataataataaattgcttttgtgtttaatatgtaacacgtaagaacaattgaaattttcttctaagatttaatactagtcttttagtataaaggaatgtaactggagaaaaaaattaatgctacagccatttatcctgtgttatgtgttatataatctgaaatttgtcacaatgttacaatcaggaagttttttttctggtttcttcttccaaaggaaaataatagcctacttgtattttgaagtaactgaaataaaactctctccaagcctttttgcacatta

SEQ ID NO: 508 - DNA, 3983 bp, HOMO SAPIENS
ggttgcacgcctgcgcgagggcgggcggcgggggcgcgcgcgcggcgggggcgggctttgccgagcgcagagctgcagccgccgagccggacgtgtccgcgaagatggcgggccggagcatgcaagcggcaagatgtcctacagatgaattatctttaaccaattgtgcagttgtgaatgaaaaggatttccagtctggccagcatgtgattgtgaggacctctcccaatcacaggtacacatttacactgaagacacatccatcggtggttccagggagcattgcattcagtttacctcagagaaaatgggctgggctttctattgggcaagaaatagaagtctccttatatacatttgacaaagccaaacagtgtattggcacaatgaccatcgagattgatttcctgcagaaaaaaagcattgactccaacccttatgacaccgacaagatggcagcagaatttattcagcaattcaacaaccaggccttctcagtgggacaacagcttgtctttagcttcaatgaaaagctttttggcttactggtgaaggacattgaagccatggatcctagcatcctgaagggagagcctgcgacagggaaaaggcagaagattgaagtaggactggttgttggaaacagtcaagttgcatttgaaaaagcagaaaattcgtcacttaatcttattggcaaagctaaaaccaaggaaaatcgccaatcaattatcaatcctgactggaactttgaaaaaatgggaataggaggtctagacaaggaattttcagatattttccgacgagcatttgcttcccgagtatttcctccagagattgtggagcagatgggttgtaaacatgttaaaggcatcctgttatatggacccccaggttgtggtaagactctcttggctcgacagattggcaagatgttgaatgcaagagagcccaaagtggtcaatgggccagaaatccttaacaaatatgtgggagaatcagaggctaacattcgcaaactttttgctgatgctgaagaggagcaaaggaggcttggtgctaacagtggtttgcacatcatcatctttgatgaaattgatgccatctgcaagcagagagggagcatggctggtagcacgggagttcatgacactgttgtcaaccagttgctgtccaaaattgatggcgtggagcagctaaacaacatcctagtcattggaatgaccaatagaccagatctgatagatgaggctcttcttagacctggaagactggaagttaaaatggagataggcttgccagatgagaaaggccgactacagattcttcacatccacacagcaagaatgagagggcatcagttactctctgctgatgtagacattaaagaactggccgtggagaccaagaatttcagtggtgctgaattggagggtctggtgcgagcagcccagtccactgctatgaatagacacataaaggccagtactaaagtggaagtggacatggagaaagcagaaagcctgcaagtgacgagaggagacttccttgcttctttggagaatgatatcaaaccagcctttggcacaaaccaagaagattatgcaagttacattatgaacggtatcatcaaatggggtgacccagttactcgagttctagatgatggggagctgctggtgcagcagactaagaacagtgaccgcacaccattggtcagcgtgcttctggaaggccctcctcacagtgggaagactgctttagctgcaaaaattgcagaggaatccaacttcccgttcatcaagatctgttctcctgataaaatgattggcttttctgaaacagccaaatgtcaggccatgaagaagatctttgatgatgcgtacaaatcccagctcagttgtgtggttgtggatgacattgagagattgcttgattacgtccctattggccctcgattttcaaatcttgtattacaggctcttctcgttttactgaaaaaggcacctcctcagggccgcaagcttcttatcattgggaccactagccgcaaagatgtccttcaggagatggaaatgcttaacgctttcagcaccaccatccacgtgcccaacattgccacaggagagcagctgttggaagctttggagcttttgggcaacttcaaggataaggaacgcaccacaattgcacagcaagtcaaagggaagaaggtctggataggaatcaagaagttactaatgctgatcgagatgtccctacagatggatcctgaataccgtgtgagaaaattcttggccctcttaagagaagaaggagctagcccccttgattttgattgaaaatgaactatttgaaacacacagtgaccaagggaagtgaccaaggtgaagatggcctaggatcttcactgtcttactcaagatactggactaagtggaacgttctctaccttcaacatgtgctcgctctgcatgattagtgcaataaaactcccttccttatgcatactgagatagcttagtgtctcgtggaaggtgtcaatttggtttagaatgctgcgcttaccttcccatgcaggctaaagtgattccttcttgctcagtccctctgggtgggaaccatccagtacttgtggacactacacgtttcaacctctctactagcaccatcacccttgaaaactctcagtcagtgtcatgaatgttgcatgacaacagttggccgattagaaggcagactttctacatgcaaatctggcttagtaaatcgaggtgtgggccagagatcctctgacagctgtcctgagctaacactaaaagtcactgggtatttggttaaaggtctcccacaagactggtattctctttgcctgaagaaacaaggcattgaatctctaaaatgctgttctcaatcattgtcagagatgttttcaagttgcagtcagaagatctttcttaatagaaagtcagatgactaccgtgttggttgtgacttccccttaagtataactaatttgctctgtggtaagagatatgctcattattaccacttagaagatgttgttaaaaacatgtgaaagataggtatggaaaaagcatacacccccaaacagaaaggagttattaaagtaatttacaaacctctcagcactaattagtgtccaactccaagtgggtcaattccttagtataatattaaggcttactagtatcactgctttttccttagcttaatgacttacttagaatttatcctttattttaaatgatctgtactatctagtgtctaaaacactattctccagaaaaatcaatcattttctagccctctccctcagtcctttattgtccattccaatacattgaacacatttcctttaccctccacacacttcttccaaaaggaagcacccgttgagtccttttgagggtgatttgtcttacaactgactgacttagcaggaatttaattaggtcatatttggtgatgagacttatggagtgtgcctctctctcccaactgctgcttaaaatgcaaggacaagcaattagaagccatcctaaggtgcttacctcacacgccacccatgaggcttgtggccacagtggcacttgggtgtggctcctctgttatttgtcctcatgtgagaaagcagatcatctccaaatcttgccatttgtatacttttggtggagacttggatgtcatatcttctttgttttgggttttcttccctagcttattttgtggcttttaaagaagtggattgtattgtgagatcctgtgattcctggtggccagtatcctggattcctctaagatcttgcctctttcctcctcatgaaagcagcacacattgtgttaacttatgtctcttgttaaatgagcttaatgtctttgtgttttgtccaaaactgtattgaaaaaatattgtttaatgcaaatgaaggaatgcaataaagagtaaatatacttgaaaatgt

SEQ ID NO: 509 - DNA, 1180 bp, HOMO SAPIENS
ctctccttctcctcctcctcctcctggggctcctaccccgcttcctctcggctctcccttatctctccggcacggtctctgactatctcttactcacggtgtctccccgcccctccctccgcagccgggggccaattccgcgagaggacaaattagtaaaaggcagagcagtccccggggaggggccagcgcggggggacatgcgggggctggggcgcggcggaagggcacgcggggaaacgagggggaggggcgggcaaggggtatttttaaccaggggcagcagctcgagttgcagggccggacggccgcaccccacgcgcgccctggcgggcattccggggcgattgtgcggcggcgccgcctcccgcagccccgggcccgcccggtccccagctcccctcgctccgcgcgaccgcagctgctcccgccgttcccagccagccccggcgcggggccgagattacctcgggctgcggcagctgctctgaggaggggccgggctggcagcgagcagacccctgccggacactcagcaaacggcagcctcaccccgcagggccgcgccactccccttccccaccccaccgccgcgtcccggctcagcgctccccggggaacgcagggggaccgggctcgctgcgtgaccttgggctctcagcccacccacctggaagcgcccatgtgtcaccttacccaggagagggcggcagaggctgcgagcaggacggcagccccctctccccacccccaggaccctgagatcctgcttcacgggctgcaagaagttggggggccaggattcggcgcggaggccgggggtgtgggtggggagactgcagagactcccgagacccccccaagtcagggcttttcgctggtctcgcagccccagcccagcagctgctgcagtcttgcatgttgtggatgcaagcattttgctgaggaaactgcatagcgttcccaggactctagggcccacgacccctcaaaagttaagagccgctgatctaatctaaccccactttcaccctcagttaacaaaagaggaaaactgaggcctgagagggtgtgacttgtttgataactatttaggatacaccatcaaaatttaactcaaactggattacacacctaaatataaatggccaaaccataaaacttttttttttaaaaatgg

SEQ ID NO: 510 - DNA, 698 bp, HOMO SAPIENS
ctcaggctcagctccgtctcgctcggtccctcgcttccccgccgggctctagccggccgtctggtggcccgaggtggcggcgggctgggcgcggggcgcgatgagcggcgcctgcacgagctacgtgagcgcagagcaggaggtggtgcgcggcttcagctgcccgcggccggggggcgaggcggccgctgtcttctgctgcggcttccgcgaccacaagtactgctgcgacgacccgcacagcttcttcccctacgagcacagctacatgtggtggctcagcattggcgctctcataggcctgtccgtagcagcagtggttcttctcgccttcattgttaccgcctgtgtgctctgctacctgttcatcagctctaagccccacacaaagttggacctgggcttgagcttacagacagcaggccctgaggaggtttctcctgactgccaaggtgtgaacacaggcatggcggcagaagtgccaaaagtgagccctctccagcagagttactcctgcttgaacccgcagctggagagcaatgaggggcaggctgtgaactccaaacgcctcctccatcattgcttcatggccacagtgaccaccagtgacattccaggcagccctgaggaagcctctgtacccaaccctgacctatgtggaccagtcccataaacattcaataaatgtctccatacca

SEQ ID NO: 511 - DNA, 1516 bp, HOMO SAPIENS
aaatactggggccagctcaccctggtcagcctagcactctgacctagcagtcaacatgaaggctctcattgttctggggcttgtcctcctttctgttacggtccagggcaaggtctttgaaaggtgtgagttggccagaactctgaaaagattgggaatggatggctacaggggaatcagcctagcaaactggatgtgtttggccaaatgggagagtggttacaacacacgagctacaaactacaatgctggagacagaagcactgattatgggatatttcagatcaatagccgctactggtgtaatgatggcaaaaccccaggagcagttaatgcctgtcatttatcctgcagtgctttgctgcaagataacatcgctgatgctgtagcttgtgcaaagagggttgtccgtgatccacaaggcattagagcatgggtggcatggagaaatcgttgtcaaaacagagatgtccgtcagtatgttcaaggttgtggagtgtaactccagaattttccttcttcagctcattttgtctctctcacattaagggagtaggaattaagtgaaaggtcacactaccattatttccccttcaaacaaataatatttttacagaagcaggagcaaaatatggcctttcttctaagagatataatgttcactaatgtggttattttacattaagcctacaacatttttcagtttgcaaatagaactaatactggtgaaaatttacctaaaaccttggttatcaaatacatctccagtacattccgttctttttttttttgagacagtctcgctctgtcgcccaggctggagtgcagtggcgcaatctcggctcactgcaacctccacctcccgggttcacgccattctcctgcctcagcctcccgagtagctgggattacgggcgcccgccaccacgcccggctaattttttgtatttttagtagagacagggtttcaccgtgttagccaggatggtctcgatctcctgaccttgtgatccacccacctcggcctcccaaagtgctgggattacaggcgtgagccactgcgcccggccacattcagttcttatcaaagaaataacccagacttaatcttgaatgatacgattatgcccaatattaagtaaaaaatataagaaaaggttatcttaaatagatcttaggcaaaataccagctgatgaaggcatctgatgccttcatctgttcagtcatctccaaaaacagtaaaaataaccactttttgttgggcaatatgaaatttttaaaggagtagaataccaaatgatagaaacagactgcctgaattgagaattttgatttcttaaagtgtgtttctttctaaattgctgttccttaatttgattaatttaattcatgtattatgattaaatctgaggcagatgagcttacaagtattgaaataattactaattaatcacaaatgtgaagttatgcatgatgtaaaaaatacaaacattctaattaaaggctttgcaacac

SEQ ID NO: 512 - DNA, 2643 bp, HOMO SAPIENS
gcttcagttaccagccggctacgtcgcgcctgcgctttgacccccagtttgcgccccaactccggtcgtgcggccgcccggggagggctctgcagttgcgcagcttgctccccggcccttttcccctccgctccccgccgcctcctgacgccgggcgtgacgtcaccacgcccggcggccgccattacagagagccgagctctggagcctcagcgagcggaggaggaggcgcagcggccgacggccgagtactgcggtgagagccagcgggccagcgccagcctcaacagccgccagaagtacacgaggaaccggcggcggcgtgtgcgtgtaggcccgtgtgcgggcggcggcgcgggagcagcgcggagcggcagccggctggggcgggtggcatcatggacgagaaggtgttcaccaaggagctggaccagtggatcgagcagctgaacgagtgcaagcagctgtccgagtcccaggtcaagagcctctgcgagaaggctaaagaaatcctgacaaaagaatccaacgtgcaagaggttcgatgtccagttactgtctgtggagatgtgcatgggcaatttcatgatctcatggaactgtttagaattggtggcaaatcaccagatacaaattacttgtttatgggagattatgttgacagaggatattattcagttgaaacagttacactgcttgtagctcttaaggttcgttaccgtgaacgcatcaccattcttcgagggaatcatgagagcagacagatcacacaagtttatggtttctatgatgaatgtttaagaaaatatggaaatgcaaatgtttggaaatattttacagatctttttgactatcttcctctcactgccttggtggatgggcagatcttctgtctacatggtggtctctcgccatctatagatacactggatcatatcagagcacttgatcgcctacaagaagttccccatgagggtccaatgtgtgacttgctgtggtcagatccagatgaccgtggtggttggggtatatctcctcgaggagctggttacacctttgggcaagatatttctgagacatttaatcatgccaatggcctcacgttggtgtctagagctcaccagctagtgatggagggatataactggtgccatgaccggaatgtagtaacgattttcagtgctccaaactattgttatcgttgtggtaaccaagctgcaatcatggaacttgacgatactctaaaatactctttcttgcagtttgacccagcacctcgtagaggcgagccacatgttactcgtcgtaccccagactacttcctgtaatgaaattttaaacttgtacagtattgccatgaaccatatatcgacctaatggaaatgggaagagcaacagtaactccaaagtgtcagaaaatagttaacattcaaaaaacttgttttcacatggaccaaaagatgtgccatataaaaatacaaagcctcttgtcatcaacagccgtgaccactttagaatgaaccagttcattgcatgctgaagcgacattgttggtcaagaaaccagtttctggcatagcgctatttgtagttacttttgctttctctgagagactgcagataataagatgtaaacattaacacctcgtgaatacaatttaacttccatttagctatagctttactcagcatgactgtagataaggatagcagcaaacaatcattggagcttaatgaacatttttaaaaataattaccaaggcctcccttctacttgtgagttttgaaattgttctttttattttcagggataccgtttaatttaattatatgatttgtctgcactcagtttattccctactcaaatctcagccccatgttgttctttgttattgtcagaacctggtgagttgttttgaacagaactgttttttccccttcctgtaagacgatgtgactgcacaagagcactgcagtgtttttcataataaacttgtgaactaagaactgagaaggtcaaattttaattgtatcaatgggcaagactggtgctgtttattaaaaaagttaaatcaattgagtaaattttagaatttgtagacttgtaggtaaaataaaaatcaagggcactacataacctctctggtaactccttgacattcttcagattaacttcaggatttatttgtatttcacatattacaatttgtcacattgttggtgtgcactttgtgggttcttcctgcatattaacttgtttgtaagaaaggaaatctgtgctgcttcagtaagacttaattgtaaaaccatataacttgagatttaagtctttgggttttgttttaataaaacagcatgttttcaggtagagcttaaactaaatgatgtgtttacttagtgcagtttctggttatgaatattatattgctatgtgtatattatatggactctttaaaatgattgacagattggcaaattcttaaatctttgtacattgttgagtcatatgttcttagagttaaatttgtctcagataagaaagtgttaaagcattagcctgtgtcaagttctttgagtgatactagtgaaaccaaatagaaaactattgttggatcatgatttagtcttatgtacattcacccga

SEQ ID NO: 513 - DNA, 2117 bp, HOMO SAPIENS
acgtggaggggaggcagccacagtcctggagaggcctgagcctgaacaacatggcttcccccagcgtgagactcgcttgtcctcccaccgcctgctctctcctgatgaccaggttccaggagttatcaaagaacagcctctgagctgcgtggagaaagccatggagacagccagaagaaaacggcaggattagattaacctgtgattcctggctggccacgaggtcacccatggcatggagctgcccacaacgcccttctcagcatgaagcatcctgaaagatccagggccaggttccccaggattggggagttggaagctcattggcactgtcaaatttgaagaagaggcgtgctctgactgcctggacaggacccggaatcaaaccgcaggccctgggtcaccgctgccggaaagagccagttcctgtccgtccatgcacccaccaccaaaacccaggccttcctggaggtgctaggggaggccatgccccttttctgagtgcttggaagtgactgctgcaagtgacaagtgaccacgccttttcccccgcgggtataaattcagaggcgctgcgctccgattctggcagtgcagctgtgggaacctctccacgcgcacgaactcagccaacgatttctgatagatttttgggagtttgaccagagatgcaaggggtgaaggagcgcttcctaccgttagggaactctggggacagagcgccccggccgcctgatggccgaggcagggtgcgacccaggacccaggacggcgtcgggaaccataccatggcccggatccccaagaccctaaagttcgtcgtcgtcatcgtcgcggtcctgctgccagtcctagcttactctgccaccactgcccggcaggaggaagttccccagcagacagtggccccacagcaacagaggcacagcttcaagggggaggagtgtccagcaggatctcatagatcagaacatactggagcctgtaacccgtgcacagagggtgtggattacaccaacgcttccaacaatgaaccttcttgcttcccatgtacagtttgtaaatcagatcaaaaacataaaagttcctgcaccatgaccagagacacagtgtgtcagtgtaaagaaggcaccttccggaatgaaaactccccagagatgtgccggaagtgtagcaggtgccctagtggggaagtccaagtcagtaattgtacgtcctgggatgatatccagtgtgttgaagaatttggtgccaatgccactgtggaaaccccagctgctgaagagacaatgaacaccagcccggggactcctgccccagctgctgaagagacaatgaacaccagcccggggactcctgccccagctgctgaagagacaatgaccaccagcccggggactcctgccccagctgctgaagagacaatgaccaccagcccggggactcctgccccagctgctgaagagacaatgatcaccagcccggggactcctgcctcttctcattacctctcatgcaccatcgtagggatcatagttctaattgtgcttctgattgtgtttgtttgaaagacttcactgtggaagaaattccttccttacctgaaaggttcaggtaggcgctggctgagggcggggggcgctggacactctctgccctgcctccctctgctgtgttcccacagacagaaacgcctgcccctgccccaagtcctggtgtctccagcctggctctatcttcctccttgtgatcgtcccatccccacatcccgtgcaccccccaggaccctggtctcatcagtccctctcctggagctgggggtccacacatctcccagccaagtccaagagggcagggccagttcctcccatcttcaggcccagccaggcagggggcagtcggctcctcaactgggtgacaagggtgaggatgagaagtggtcacgggatttattcagccttggtcagagcagaacacagagattttccgtgtgttggtttttactctagttccccttctcatcccccttcctcagggtgtcccctaattgcaaggccccattcctgtccccagccccagggctccttgtccagtgtcccagcccccagcccagccct

SEQ ID NO: 514 - DNA, 744 bp, HOMO SAPIENS
ctctatccaacccttggcttcccaactgcgtatttaaaccccgcccctgttgaacccttcggcttttcttcactcccggcttcctccgtcacgtttggcccggctcagccgccgtgacaggcctttgcgcatgtgcagaagggaaacgtgaagaagcctcccacatgaccaaggacatgttcccggggccctatcctaggaccccagaagaacgggccgccgccgccaagaagtataatatgcgtgtggaagactacgaaccttacccggatgatggcatggggtatggcgactacccgaagctccctgaccgctcacagcatgagagagatccatggtatagctgggaccagccgggcctgaggttgaactggggtgaaccgatgcactggcacctagacatgtacaacaggaaccgtgtggatacatcccccacacctgtttcttggcatgtcatgtgtatgcagctcttcggtttcctggctttcatgatattcatgtgctgggtgggggacgtgtaccctgtctaccagcctgtgggaccaaagcagtatccttacaataatctgtacctggaacgaggcggtgatccctccaaagaaccagagcgggtggttcactatgagatctgaggaggcttcgtgggcttttgggtcctctaactaggactccctcattcctagaaatttaaccttaatgaaatccctaataaaactcagtgctgtgttatttgtgcctcatttc

SEQ ID NO: 515 - DNA, 1050 bp, HOMO SAPIENS
cacgctcccccgcacctgcgggcgcagtggacccgaccgctccgctcgtccgctccctcccccgcgccgtgcacgtcttggttcgggccgggcataaaaggcttcgcggcccagggctcacttggcgctgagaacgcgggtccacgcgtgtgatcgtccgtgcgtctagcctttgcccacgcagctttcagtcatggcctccggtaacgcgcgcatcggaaagccagcccctgacttcaaggccacagcggtggttgatggcgccttcaaagaggtgaagctgtcggactacaaagggaagtacgtggtcctctttttctaccctctggacttcacttttgtgtgccccaccgagatcatcgcgttcagcaaccgtgcagaggacttccgcaagctgggctgtgaagtgctgggcgtctcggtggactctcagttcacccacctggcttggatcaacaccccccggaaagagggaggcttgggccccctgaacatccccctgcttgctgacgtgaccagacgcttgtctgaggattacggcgtgctgaaaacagatgagggcattgcctacaggggcctctttatcatcgatggcaagggtgtccttcgccagatcactgttaatgatttgcctgtgggacgctccgtggatgaggctctgcggctggtccaggccttccagtacacagacgagcatggggaagtttgtcccgctggctggaagcctggcagtgacacgattaagcccaacgtggatgacagcaaggaatatttctccaaacacaattaggctggctaacggatagtgagcttgtgcccctgcctaggtgcctgtgctgggtgtccacctgtgcccccacctgggtgccctatgctgacccaggaaaggccagacctgcccctccaaactccacagtatgggaccctggagggctaggccaaggccttctcatgcctccacctagaagctgaatagtgacgccctcccccaagcccacccagccgcacacaggcctagaggtaaccaataaagtattagggaaaggtgtg

SEQ ID NO: 516 - DNA, 4811 bp, HOMO SAPIENS
gttaagttggagccgactcagcggcggccgccattttgtgcagtcgctgggaaggaaggagacgcctaaaccgcggcactgcccggtttgagcgtagccaaacctgcccaccggctttgtagccccgattctctgtgttttgctcccgtctccgacgagagaggcggcgacggtggcgtctgcgacgggagacagcgcgtcggagcgagagagcgctgcgcctgccgccgccccaacagcggaggcgccgccgccatcggtcgtcaccagaccggagccgcaggccctcccgagcccggccatccgtgccccgctcccagatctctatccttttgggaccatgcgcggaggaggctttggggaccgggaccgggatcgtgaccgtggaggatttggagcaagaggtggtggtggccttcccccgaagaaatttggtaatcctggggagcgtttgcgtaaaaaaaagtgggatttgagtgagctccccaagtttgagaaaaatttttatgtggaacatccggaagtagcaaggctgacaccatatgaggttgatgagctacgccgaaagaaggagattacagtgagggggggagatgtttgtcctaaacccgtgtttgccttccatcatgctaacttcccacaatatgtaatggatgtgttgatggatcagcactttacagaaccaactccaattcagtgccagggatttccgttggctcttagtggccgggatatggtgggcattgctcagactggctctgggaagacgttggcgtatctcctgcctgcaattgttcatattaaccaccagccatacttggaaaggggagatggcccaatctgtctagttctggctcctaccagagagcttgcccagcaagtacagcaggtggccgatgactatggcaaatgttctagattgaagagtacttgtatttatggaggtgctcctaaaggtccccagattcgagacttggaaagaggtgttgagatctgcatagccactcctggacgtctgatagatttcctggagtcaggaaagacaaatcttcgccgatgtacttaccttgtattggacgaagctgacagaatgcttgatatggggtttgaaccccagatccgtaaaattgttgaccaaatcaggcctgataggcagacactgatgtggagtgcaacctggccaaaagaagtaagacagcttgcagaggatttccttcgtgattacacccagatcaacgtaggcaatctggagttgagtgccaaccacaacatcctccagatagtggatgtctgcatggaaagtgaaaaagaccacaagttgatccaactaatggaagaaataatggctgaaaaggaaaacaaaacaataatatttgtggagacaaagagacgctgtgatgatctgactcgaaggatgcgcagagatggttggccagctatgtgtatccatggagacaagagtcaaccagaaagagattgggtacttaatgagttccgttctggaaaggcacccatccttattgctacagatgtagcctcccgtgggctagatgtggaagatgtcaagtttgtgatcaactatgactatccaaacagctcagaggattatgtgcaccgtattggccgaacagcccgtagcaccaacaagggtaccgcctataccttcttcaccccagggaacctaaaacaggccagagagcttatcaaagtgctggaagaggccaatcaggctatcaatccaaaactgatgcagcttgtggaccacagaggaggcggcggaggcgggggtaagggtggtcgttctcgttaccggaccacttcttcagccaacaatcccaatctgatgtatcaggatgagtgtgaccgaaggcttcgaggagtcaaggatggtggccggagagactctgcaagctatcgggatcgtagtgaaaccgatagagctggttatgctaatggcagtggctatggaagtccaaattctgcctttggagcacaagcaggccaatacacctatggtcaaggcacctatggggcagctgcttatggcaccagtagctatacagctcaagaatatggtgctggcacttatggagctagtagcaccacctcaactgggagaagttcacagagctctagccagcagtttagtgggataggccggtctgggcagcagccacagccactgatgtcacaacagtttgcacagcctccgggagctaccaatatgataggttacatggggcagactgcctaccaataccctcctcctcctccccctcctcctccttcacgtaaatgaaaccactcaagtggtagtgactccagcagacttaattacattttaaggaacactgtctttcctttttttttcctcttcgccttttctttttttttccttttttctttttttttttttaatttttccccccaaccatcgtgatttgtcttttcatgcagattagttagaattcactgccaggtttcttctgcccaccaaaatgatccagtctggaataacattttgtaaaaaaaaaaaaaatatatatatatatatatagctgactggaagagattaatttcttcccccaacttcttgcatgttgaagatatttgagctatttttcatctaaaagagtaaggtattaggcccttttgtgggagccccatgttttgtttttctgagttggtggggagggagggagggggagggctgaattgttttgcagaggaagatggcatctgtgctttaaatttctcattactgggttagaaaacaaagagggattgccctgcacattttcttttgtgcttttaaatgtttcttaagttggaacaggtttcctcgggcctgttttgactgattgctggagtgcatttgatagttaaaaattactaattggttttatttcccttcacactctgcctccccacttctccccccgttactgaaaaataaccattttagtgtcaggctagaaattgaattgctgagttttgtgtatcctttaaattaaaaaccacaagtgtttattgtagtggttaaactgtagcatctcagcatctgggtggaagctgcctatatttcttcccagtttaactggggaccatctgtgaaattaattttccatccagacagctgctgtgagcaaatgaacataaatgctcgctggaaatttactaaccagtttttatattgacctgcagtgtaaaaagcacatttaattataaacaatatattcaaaatgggcaaattttattttcaaatgcagtgtagagctagattaaaagcaactctttgccacctactctgcccttttggcaaagttaccttgaacaaagaatcttaagggtttattaagaactctttattttcttcataccctgttctctgcagtgctttctaacagcttctgggtgcagattttcttcggcatccttttgcactcagcttattacaggtaggtagtgcttaagaaaagtcatggaggactaaagcctaagtccttttcacttttcctccatctgaaggtaggtgagttcatcctcttcatggtaatgctgttttaccaagactttatagcagatggacccagaaagaattttctgctattgtgttcactacaacaggatagggacatcagacagccccagaaaccccttccagatctgatatgggactattaatttttatgctgttaattggtattcattcacaatgcagttgaagggggaaggctccactgcattctttggctaaggcctgaatgcttgctcatctgtaagatctatactcgaggttttgttttccttttaaaattctttagggagagagggatggtttctgaggggttctgaaagtatgattcaatgtgcaacatacaggtaggtcttcagcataagctgaaatatatgcatgtaaaaactttgacatctttttttttaattttccactttcttcttaactttacttctctttttgtcccccccccatcttacagaagttgaggccaagggagaatggtaggcacagaagaaacatggcaaactgctctgtgctttcaaaccaaagtgttccccccaaccccaaatttgtctaagcactggccagtctgttgtgggcattgttttctacaaccaaattctgggtttttttcttctttctttaaacatagaggtaccaccacaagggatgccctactctctcgcagctcttgaaagcatctgtttgagggaaaggtctctgggcaagcaagtggttatttggattgcttgcttccctttttccacctgggacattgtaatcataaaataacagtaaattccaaacctcaaaaactattatggcctgagcacagctgaaatctagcagagtttaactcttctgcctccatgtctgtcacttataattcaggttctgctgttggcttcagaacatgagcagaagaatcgttttatgctagttattgcattcatggttgaaactcaacttagggaaagggttccaatgtattaagcaatgggctgcttctccccaatcctccctaacaattcgttgtgtggacttctcatctaaaaggttagtggcttttgcttgggatcagtgctctctattgatgttcttgctggtctccagacacattcctgttgcattaagacttgaaagacttgtagatgtgtgatgttcaggcacaggatgctgaaagctatgttactattcttagtttgtaaattgtccttttgataccatcatcttgttttctttttgtaggtataaataaaaacactgttgacaataaaaaaaaaaaaaaaaa

SEQ ID NO: 517 - DNA, 602 bp, HOMO SAPIENS
cttcccagccctgtgccccaaagcacctggagcatatagccttgcagaacttctacttgcctgcctccctgcctctggccatggcctgccggtgcctcagcttccttctgatggggaccttcctgtcagtttcccagacagtcctggcccagctggatgcactgctggtcttcccaggccaagtggctcaactctcctgcacgctcagcccccagcacgtcaccatcagggactacggtgtgtcctggtaccagcagcgggcaggcagtgcccctcgatatctcctctactaccgctcggaggaggatcaccaccggcctgctgacatccccgatcgattctcggcagccaaggatgaggcccacaatgcctgtgtcctcaccattagtcccgtgcagcctgaagacgacgcggattactactgctctgttggctacggctttagtccctaggggtggggtgtgagatgggtgcctcccctctgcctcccatttctgcccctgaccttgggtcccttttaaactttctctgagccttgcttcccctctgtaaaatgggttaataatattcaacatgtcaacaacaaaaaaaaaaaaaaaaaa

SEQ ID NO: 518 - DNA, 1528 bp, HOMO SAPIENS
gcgcatgcgctgcgctgcctttcccgggcgctgattcctgagtgctgagcgcgaacccgaggagatgaaccctttaactaaggtgaagctgatcaacgagctgaatgaacgagaggtccagcttggggtggccgataaggtgtcctggcactccgagtacaaggacagcgcctggatcttcctgggagggcttccttatgaactgactgaaggggacatcatctgtgtgttctcacaatatggggagattgttaacattaatctcgtgcgggacaagaaaactgggaaatccaaaggattctgtttcctctgctatgaagaccagaggagcacaattctggccgtcgacaattttaatgggatcaagatcaaaggaagaactatccgagtggatcatgtgtctaactatcgggctcctaaggactcagaagaaatagatgatgtgaccagacaactccaggagaagggctgtggggctcgtaccccctcaccaagtttgtctgagagctctgaagatgaaaaaccaacaaaaaagcacaaaaaagacaaaaaggaaaaaaagaaaaaaaagaaagaaaaagagaaagccgaccgggaggtacaggcagagcaaccatcctcttcgtcacccagacgcaagacagtaaaggaaaaggatgacactggccctaagaagcacagcagcaagaactcagagagagctcagaagtcagagcccagggaggggcagaagctccccaaatccaggacggcctactctggtggagcagaggacctagagagggagctgaagaaggagaaacccaagcacgagcacaagtcctcaagcaggagggaggcaagagaagaaaagaccaggattagggacagagggcggagctcagatgcacattctagctggtataatgggcgttctgaagggcgtagttatagaagtagaagtaggagccgagataaatcccataggcataaaagggcccgacgctcccgggagcgggagtcttcgaatcccagtgaccgttggcgtcactgaagacttcagctgcacagtagatttggaaataattatgttttttaaatgcagtcaaattcagttgggtggttactatttttgtatctaaaacttctggggctggattcttttaatcccttgactatttagagtcattgggagggctgcagtttcaacagctagatatcctggatattgtttgcaccatccattgtccctgtaccagagtatgtatcctgaactttggttcataaatatggctcttgaacccatagaccccagttgaagatggaattttcaggaaagggaaaatactagataattctagaattctagtcttcgtgttagatgtttatagcccagcatcttgggacctttccagttactaggtttggacagcttgatgtgaacgaatgggataggatttttaaaatcagccagctccatgcccaaaccttcctgtttgcagaactttttaatgtcttttctttttcattaaaacttttttgttcgata

SEQ ID NO: 519 - DNA, 2166 bp, HOMO SAPIENS
cggacagaggttccgggaaccagccgggccggggcggggcggggcgagggagaggggcggccgcgcggatcactgaggctgtggcggcactgcgcccggcgctcgcgtccgtccgcccgtccgcccgcccagccatgactgcgccggtccccgcgccgcggatcctgttgccgttgctgttgctgctgctgctaacgccgcctccgggtgcacgtggtgaggtgtgtatggcttcccgtggactcagcctcttccccgagtcctgtccagatttctgctgtggtacctgtgatgaccaatactgctgctctgacgtgctgaagaaatttgtgtggagcgaggaaaggtgtgctgtgcctgaggccagcgtgcctgccagtgtagagccggtggagcagctgggctcggcgctgaggtttcgccctggctacaacgaccccatgtcagggttcggagcgaccttggccgttggcctgaccatctttgtgctgtctgtcgtcactatcatcatctgcttcacctgctcctgctgctgcctttacaagacgtgccgccgaccacgtccggttgtcaccaccaccacatccaccactgtggtgcatgccccttatcctcagcctccaagtgtgccgcccagctaccctggaccaagctaccagggctaccacaccatgccgcctcagccagggatgccagcagcaccctacccaatgcagtacccaccaccttacccagcccagcccatgggcccaccggcctaccacgagaccctggctggaggagcagccgcgccctaccccgccagccagcctccttacaacccggcctacatggatgccccgaaggcggccctctgagcattccctggcctctctggctgccacttggttatgttgtgtgtgtgcgtgagtggtgtgcaggcgcggttccttacgccccatgtgtgctgtgtgtgtccaggcacggttccttacgccccatgtgtgctgtgtgtgtcctgcctgtatatgtggcttcctctgatgctgacaaggtggggaacaatccttgccagagtgggctgggaccagactttgttctcttcctcacctgaaattatgcttcctaaaatctcaagccaaactcaaagaatggggtggtggggggcaccctgtgaggtggcccctgagaggtgggggcctctccagggcacatctggagttcttctccagcttaccctagggtgaccaagtagggcctgtcacaccagggtggcgcagctttctgtgtgatgcagatgtgtcctggtttcggcagcgtagccagctgctgcttgaggccatggctcgtccccggagttgggggtacccgttgcagagccagggacatgatgcaggcgaagcttgggatctggccaagttggactttgatcctttgggcagatgtcccattgctccctggagcctgtcatgcctgttggggatcaggcagcctcctgatgccagaacacctcaggcagagccctactcagctgtacctgtctgcctggactgtcccctgtccccgcatctcccctgggaccagctggagggccacatgcacacacagcctagctgcccccagggagctctgctgcccttgctggccctgcccttcccacaggtgagcagggctcctgtccaccagcacactcagttctcttccctgcagtgttttcattttattttagccaaacattttgcctgttttctgtttcaaacatgatagttgatatgagactgaaacccctgggttgtggagggaaattggctcagagatggacaacctggcaactgtgagtccctgcttcccgacaccagcctcatggaatatgcaacaactcctgtaccccagtccacggtgttctggcagcagggacacctgggccaatgggccatctggaccaaaggtggggtgtggggccctggatggcagctctggcccagacatgaatacctcgtgttcctcctccctctattactgtttcaccagagctgtcttagctcaaatctgttgtgtttctgagtctagggtctgtacacttgtttataataaatgcaatcgtttggagctgctgccccctttcttcctggcctcggctgctggaattggaatcaggctgtactctttccatccatttgggcttct

SEQ ID NO: 520 - DNA, 3213 bp, HOMO SAPIENS
gaccgaagcaagagctggttcaggtggcagccacagcagcctcagggacctcagcaactatggcctcctgcccagactctgataatagctgggtgcttgctggctccgagagcctgccagtggagacactgggcccggcatccaggatggacccagaatctgagagagccctgcaggcccctcacagcccctccaagacagatgggaaagaattagctgggaccatggatggagaagggacgctcttccagactgaaagccctcagtctggcagcattctaacagaggagactgaggtcaagggcaccctggaaggtgatgtttgtggtgtggagcctcctggcccaggagacacagtagtccagggagacctgcaggagaccaccgtggtgacaggcctgggaccagacacacaggacctggaaggccagagccctccacagagcctgccttcaacccccaaagcagcttggatcagggaggagggccgctgctccagcagtgacgatgacaccgacgtggacatggagggtctgcggagacggcggggccgggaggccggcccacctcagcccatggtgcccctggctgtggagaaccaggctgggggtgagggtgcaggcggggagctgggcatctccctcaacatgtgcctccttggggccctggttctgcttggcctgggggtcctcctcttctcaggtggcctctcagagtctgagactgggcccatggaggaagtggagcggcaggtcctcccagaccccgaggtgctggaagctgtgggggacaggcaggatgggctaagggaacagctgcaggccccagtgcctcctgacagtgtccccagcctgcaaaacatgggtcttctgctggacaagctggccaaggagaaccaggacatccggctgctgcaggcccagctgcaggcccaaaaggaagagcttcagagcctgatgcaccagcccaaagggctagaggaggagaatgcccagctccggggggctctgcagcagggcgaagccttccagcgggctctggagtcagagctgcagcagctgcgggcccggctccaggggctggaggccgactgtgtccggggcccagatggggtgtgcctcagtgggggtagaggcccacagggtgacaaggccatcagggagcaaggccccagggagcaggagccagaactcagcttcctgaagcagaaggaacagctggaggctgaggcacaggcattaaggcaagagttagagaggcagcgacggctgctggggtctgtacagcaggatctggagaggagcttgcaggatgccagccgcggggacccagctcatgctggcttggctgagctgggccacagattggcccagaaactgcagggcctggagaactggggccaggaccctggggtctctgccaatgcctcaaaggcctggcaccagaagtcccacttccagaattctagggagtggagtggaaaggaaaagtggtgggatgggcagagagaccggaaggctgagcactggaaacataagaaggaagaatctggccgggaaaggaagaagaactggggaggtcaggaggacagggagccagcaggaaggtggaaggagggcaggccaagggtggaggagtcggggagcaagaaggagggcaagcgacagggcccgaaggaacccccaaggaaaagtggtagcttccactcctctggagaaaagcagaagcaacctcggtggagggaagggactaaggacagccatgaccccctgccatcctgggcagagctgttgaggcccaagtaccgggcaccccagggctgctcaggtgtggacgagtgtgcccggcaggagggcctgactttctttggcacagagctagccccagtgcggcaacaggagctggcctctctgctaagaacatacttggcacggctgccctgggctgggcagctgaccaaggagctacccctctcacctgctttctttggtgaggatggcatcttccgtcatgaccgcctccgcttccgggattttgtggatgccctggaggacagcttggaggaggtggctgtgcaacagacaggtgatgatgatgaagtagatgactttgaggacttcatcttcagccacttctttggagacaaagcactgaagaagaggtcagggaagaaggacaagcactcacagagcccaagagctgcggggcccagggaggggcacagccatagccaccaccaccaccaccggggctgacaccctgccccacagggaatggccttggcctggcccagcccaagatcccagcgttatctaactcctggagggtggactctgtcctggcttgtttggtgtcctcagatatctttcacacagtagagcaaaatcaccagccctgcactgatgtcactttatgtagaaaaaggccttagctggacctgcgttgccgtctatgcaaatgcatgcaaatactccaggccctgggatgtgggcttgtgttttgtcactgtgaagggggagatgggagaggagcctgttttggggtggggtctggggaaggcaatctgattctgaagctaaagagctttcatcctcttgagtgtatgtccccatagtgggccccttgacccacatgctgaccggtgccttgggatttgactagagttgctggctcgaggcccagcacgaggacttaccctggggttttgttaggtttggaagcagctgtccctagggggtgaagtcccccccctttttttttttacccctgcttctcccacggcttcacctccctatgtgaactgtagactcagatcccaataaagtgctgttgcagctatgatgctaggtggtttctaagcacaggggacaccccacaccccctgcctgaatggatgggtccatcccaggcactggtacttgcccccttgttctgtatccccctttgcccttgccttgcccttccaacaaaccctaggcccttgagaagctgatacttctccttttgctcacagctgccttggccccacccctgggagatgtagcaaattgagtgtgggttttggagtctgagcctcaggctcaaatccaggccaagtgatcttgggcaagttaatctctgggaactttgggtttcttatcctcaaaaaaggcgatggaagggctggggaagtgattaaataaaagcaacgcaagaaaaaaaaaaaaaaaaaaa

SEQ ID NO: 521 - DNA, 537 bp, HOMO SAPIENS
aacttccgcttccggttcctagcgttaactgcgaccggggttcagcgctcgggtgaggagctggtggcgtcggcaggttcgaggcgattcgaggtgagggggtcaagcggagaggctcggagtcggagaaagctgtcgcgacccagccacccagggtctggggtcggtgggagctccagctaggatgatcgaggttgtttgcaacgaccgtctggggaagaaggtccgcgttaaatgcaacacggatgataccatcggggaccttaagaagctgattgcagcccaaactggtacccgttggaacaagattgtcctgaagaagtggtacacgatttttaaggaccacgtgtctctgggggactatgaaatccacgatgggatgaacctggagctttattatcaatagatgagaatcctcatcttcctgccccgctttcctctcccatcctcatcccccacactgggatagatgcttgtttgtaaaaactcaccttaataaagacttagatgttgctttgtaaaaaaaaaaaaaaaaaa

SEQ ID NO: 522 - DNA, 1720 bp, HOMO SAPIENS
agagcagggcctgacatctccccagaacagacgtttgaacagagcaggcttctgaggtctccaaaatgcctgtcccagcctcctggccccatcctcctggtcctttcctgcttctgactctactgctgggacttacagaagtggcaggtgaggaggagctacagatgattcagcctgagaagctcctgttggtcacagttggaaagacagccactctgcactgcactgtgacctccctgcttcccgtgggacccgtcctgtggttcagaggagttggaccaggccgggaattaatctacaatcaaaaagaaggccacttccccagggtaacaacagtttcagacctcacaaagagaaacaacatggacttttccatccgcatcagtagcatcaccccagcagatgtcggcacatactactgtgtgaagtttcgaaaagggagccctgagaacgtggagtttaagtctggaccaggcactgagatggctttgggtgccaaaccctctgcccccgtggtattgggccctgcggcgaggaccacacctgagcatacagtgagtttcacctgtgagtcccatggcttctctcccagagacatcaccctgaaatggttcaaaaatgggaatgagctctcagacttccagaccaacgtggaccccacaggacagagtgtggcctacagcatccgcagcacagccagggtggtactggacccctgggacgttcgctctcaggtcatctgcgaggtggcccatgtcaccttgcagggggaccctcttcgtgggactgccaacttgtctgaggccatccgagttccacccaccttggaggttactcaacagcccatgagggtggggaaccaggtaaacgtcacctgccaggtgaggaagttctacccccagagcctacagctgacctggtcggagaatggaaacgtgtgccagagagaaacagcctcgacccttacagagaacaaggatggtacctacaactggacaagctggttcctggtgaacatatctgaccaaagggatgatgtggtcctcacctgccaggtgaagcatgatgggcagctggcggtcagcaaacgccttgccctagaggtcacagtccaccagaaggaccagagctcagatgctacccctggcccggcatcatcccttactgcgctgctcctcatagctgtcctcctgggccccatctacgtcccctggaagcagaagacctgactctccttccttcctcccctgccacgtgggaccctcatctctgctgcctccttcctttcctgagaggctcagcttgagagaatgagccagtgagaagcttctctagacttggctccaaacatctcccctcccaagacatctgcctgcccacaggctcctgttgctccttcacacagacctggatgccccagagcaaggtcttcattcatggtcctgagcaggtgccatgggattgggctctgggcactgacttaacggcacctccctagaaggcgagaaacatgccaaatctaaacacaccaggactcccatccatcgccttgagactgaccgtaaaccacagacgctctccaggttctcaagagttatcctgccttccagattcctgcctatcccaactccccagccttgttgaggttctctattgcctcttgaatacaaatgcactcccaaagtggttttaagaaaataaaaagattatccttccaaaa

SEQ ID NO: 523 - DNA, 1614 bp, HOMO SAPIENS
ggaagcccgcagtgccggaggcccgcagcgccggaacctcagaggcgggtcgcagcggcgcagaggaggtcagctgcgggagcgtttccggggacggtgccgccatgagattgaccccgcgcgcgctgtgcagcgccgcccaggccgcctggcgggagaacttccccctgtgcggtcgcgacgtggcgcgctggttcccgggccacatggccaaggggctgaagaagatgcagagcagcctgaagctggtggactgtatcatcgaggtccacgatgcccggatcccactttcaggccgcaaccctctgtttcaggaaacccttgggcttaagcctcacttgctggtcctcaacaagatggacttggcggatcttacagagcagcagaaaattatgcaacacttagaaggagaaggcctaaaaaatgtcatttttaccaactgtgtaaaggatgaaaatgtcaagcagatcatcccgatggtcactgaactgattgggagaagccaccgctaccaccgaaaagagaacctggagtactgtatcatggtcattggggtccccaacgtgggcaagtcctccctcatcaactccctccggaggcagcacctcaggaaagggaaagccaccagggtgggtggcgagcctgggatcaccagagctgtgatgtccaaaattcaggtctctgagcggcccctgatgttcctgttggacactcctggcgtgctggctcctcggattgaaagtgtggagacaggcctgaagctggccctgtgtggaacggtgctggaccacctggtcggggaggagaccatggctgactacctgctgtacaccctcaacaaacaccagcgctttgggtacgtgcagcactacggcctgggcagtgcctgtgacaacgtagagcgcgtgctgaagagtgtggctgtgaagctggggaagacgcagaaggtgaaggtgctcacgggcacgggtaacgtgaacattattcagcctaactatcctgcggcagcccgtgacttcctgcagactttccgccgtgggctgctgggttccgtgatgctggacctcgacgtcctgcggggccaccccccggctgagactttgccctgaacttgtccgggtagggagggccggaggcatgtggcctcccagacctcctgacctgggtggttgaggctcaagacagctcacccggtccagaagctccatgctggtcactagggtgctgtgctctctggcgccccacagcctggccagctccagggaccccagttgcagggcccaagcaggtgggagtggacaccaggcttcccagtggacgtccctgagcagctccgcatgcttggttctcccggagcttcctgctcaggcctcttgagaaatggatgctgtctcagaaggagttaaagctataacctgtaacctttaaaatctccagttaaagggcctgtttcttactggcctgtgaggtgcaccgtagtgccttgggcctgtgtgttaaagctgctctcaccagtgaaacctaagaaatgagcaggttggcagctagggtttgtgttggaggctttcggtccagtgtcttgcagtcctacaacaagtgagaggcttgctgcca

SEQ ID NO: 524 - DNA, 6112 bp, HOMO SAPIENS
cggccgccatgttgttgtggggctgaggcggcgccggcggagccctgagcggctgtgacaggctacgcaacaggttcgcgggcggcggcctgacgaccaagccagctgcagtggcggcgacggcggcagagcagggtctccccgcgcctgcccgcgcccaggctgccggtgctgagggacgcggagtcgcgctgtgacgagcgggaggcgcggcgagggcgccagatggctgagagctagcaaggaaaactcaggaccatgatggctcagtttcccacagctatgaatggagggccaaacatgtgggctattacctctgaagaacgtactaagcatgacaggcagtttgataacctcaaaccttcaggaggttacataacaggtgatcaagcacgtaattttttcctacaatcaggtctgccggcccctgttttagctgaaatatgggctttatcagacctaaacaaggatgggaagatggatcagcaagagttctccatagctatgaaactcatcaaactgaagcttcaaggccaacagttgcctgtggttctccctcctattatgaagcaaccccctatgttttctccattaatttctgctcgttttggaatgggaagcatgcccaatctgtccattcctcagccattgcctccagctgcacctataacatcattgtcttctgcgacttcagggaccaaccttcctcccttaatgatgcccactcccctagtgccttctgttagcacatcatcattaccaaatggaaccgccagtctcattcagcctttacccattccttattcttcttcaacattgcctcatgggtcatcttatagtctgatgatgggaggatttggaggtgctagtatacagaaagcgcagtctctgattgatttaggatctagtagctcaacttcctcgactgcttcactctcagggaactcacccaagactgggacctcagagtgggcagttcctcagcctacaagattaaaatatcggcaaaaatttaatactcttgacaaaagtatgagtggatatctctcaggttttcaagctagaaatgcccttcttcagtcaaatctttctcaaactcagctggctactatttggactctggctgacgttgatggtgatggacagctaaaagcagaagagtttattcttgcaatgcaccttactgacatggccaaagctggacagccattaccactgactttacctcctgagcttgttcctccatctttcagaggaggaaagcaaattgattccattaatggaactctgccttcatatcagaaaatgcaagaagaggagcctcagaagaaattaccagttacttttgaggacaaacggaaagccaactatgagcgagggaacatggagctggaaaagcgacgccaagccttgatggagcagcaacaaagggaggcagaacgtaaagcccagaaagaaaaggaagagtgggaacgaaaacagagagaattacaagaacaagaatggaagaaacaacttgaattagaaaaacgcttagagaagcaacgggaattggagagacaacgagaggaagaaaggagaaaagacatagaaagacgagaggcagcaaaacaggaacttgaacgacaacgtcgcttagaatgggagagaattcggcgacaggagcttctcaatcaaaagaatagagaacaagaagaaattgtcaggttaaactctaaaaagaagaatcttcatcttgagttggaagcactgaatggcaaacatcagcagatctcaggcagacttcaggatgtccgactcaaaaagcaaactcaaaagactgagctggaagttctggataagcagtgtgacttggaaattatggaaatcaagcaacttcaacaggaacttcaggaatatcagaataagcttatctatctggtacctgagaagcaattattaaatgaaagaattaaaaacatgcagttcagtaacacacctgattcaggggtcagtttacttcataaaaaatcattagaaaaggaagaattatgccaaagacttaaagaacagttagatgctcttgaaaaagaaactgcatctaagctgtcagaaatggattcttttaacaatcaactaaagtgtgggaatatggatgactctgttcttcagtgccttttgtctctgctaagctgtctcaacaacctcttcctcttacttaaggaactgagagaaacctacaacacacagcagttagcccttgaacagctttataagatcaaacgtgacaagttgaaggaaattgaaaggaaaagattagaactaatgcagaaaaagaaactagaagatgaggctgcaaggaaagcaaagcaaggaaaagaaaacttatggaaagaaaatcttagaaaggaggaagaagaaaaacaaaagcgactccaggaagaaaaaacacaagaaaaaattcaagaagaggaacggaaagctgaggagaaacaacgtaaggataaggatactttgaaagctgaggagaaaaaacgtgagacagctagtgttttggtgaattatagagcattatacccctttgaagcaaggaaccatgatgagatgagttttaattctggagatataattcaggttgatgaaaaaaccgtaggagaacctggttggctttatggtagttttcaaggaaattttggctggtttccatgcaattatgtagaaaaaatgccatcaagtgaaaatgaaaaagctgtatctccaaagaaggccttacttcctcctacagtttctttatctgctacctcaacttcctctgaaccactttcttcaaatcaaccagcatcagtgactgattatcaaaatgtatctttttcaaacctaactgtaaatacatcatggcagaaaaaatcagccttcactcgaactgtgtcccctggatctgtatcacctattcatggacagggacaagtggtagaaaacttaaaagcacaggccctttgttcctggactgcaaagaaagataaccacttgaacttctcaaaacatgacattattactgtcttggagcagcaagaaaattggtggtttggggaggtgcatggaggaagaggatggtttcccaaatcttatgtcaagatcattcctgggagtgaagtaaaacgggaagaaccagaagctttgtatgcagctgtaaataagaaacctacctcggcagcctattcagttggagaagaatatattgcactttatccatattcaagtgtggaacctggagatttgactttcacagaaggtgaagaaatattggtgacccagaaagatggagagtggtggacaggaagtattggagatagaagtggaatttttccatcaaactatgtcaaaccaaaggatcaagagagttttgggagtgctagcaagtctggagcatcaaataaaaaacctgagattgctcaggtaacttcagcatatgttgcttctggttctgaacaacttagccttgcaccaggacagttaatattaattctaaagaaaaatacaagtgggtggtggcaaggagagttacaggccagaggaaaaaagcgacagaaaggatggtttcctgccagtcatgttaaacttttgggtccaagtagtgaaagagccacacctgcctttcatcctgtatgtcaggtgattgctatgtatgactatgcagcaaataatgaagatgagctcagtttctccaagggacaactcattaatgttatgaacaaagatgatcctgattggtggcaaggagagatcaacggggtgactggtctctttccttcaaactacgttaagatgacgacagactcagatccaagtcaacagtggtgtgctgatctgcaaaccctggacacaatgcagccaattgagaggaaaagacagggctatattcatgagctgattcagaccgaagagcggtacatggctgaccttcagctcgtcgtcgaggtttttcagaaacgcatggcagagtcaggctttctcactgaaggggagatggccctgatttttgttaactggaaggagctcatcatgtccaacacaaagctgctgaaggctttgcgggtgcggaagaagaccgggggcgagaagatgccggtgcagatgattggggacatcctggccgctgagctgtcccacatgcaggcttacatcaggttctgcagctgccagcttaatggagcagctctgttacagcagaagacagatgaagacacagatttcaaagaatttttaaagaagctggcatctgacccgcggtgtaaaggaatgcccctctccagcttcctgctgaaacccatgcagaggatcacccgctacccactgctcatcagaagtattctggagaacaccccggagagccatgcagaccattcctccctaaagctggccctcgagcgggcagaggagctgtgctctcaagtgaatgagggagttcgggagaaggaaaactcggaccgactggagtggatccaggcgcacgtgcagtgtgaaggcctcgcggagcaacttattttcaactctctcaccaactgcctggggccccggaagctcttacacagtgggaaattatacaagaccaagagcaacaaggaactgcacggattcctcttcaatgacttcctgcttcttacctacatggtcaagcagtttgctgtttcctctggctctgagaaacttttcagctcgaagtccaatgctcaattcaaaatgtataaaacgcccattttcctgaatgaagtcttggtgaaactgcccacagacccttccagcgatgagcctgtcttccacatttcccacattgatcgggtctacaccctccgaacagacaacattaatgagaggaccgcctgggtgcagaagatcaaggcggcgtctgagcagtacatcgacaccgagaagaagaagcgtgagaaagcttaccaagcccgctcccaaaagacttcaggcattgggcgcctgatggtgcatgtcattgaagctacagaattaaaagcctgcaaaccaaatggaaagagcaacccatactgtgaaatcagcatgggctcccagagctacaccaccaggaccatccaggacacactcaatcccaagtggaattttaactgccagttctttattaaggatctctaccaagacgtgctgtgtctcaccctgtttgacagagaccagttttcaccagatgatttcctgggtcgtactgaaattccagtggcaaaaattcgaacagaacaggaaagcaaaggccctatgacccgccgactgctgctgcatgaggtccccaccggggaggtctgggtccgttttgacctgcagctttttgagcaaaaaactctcctgtaggggttctaaaggacagcaccagcgggacagcccacaaggctggggctggagaatgagagactgcgctctcttggggctgagggagcaccatgcagcttcacccctcacaaagccatgcacgctgggggctctgttttcctgcacactaaatagctagcaatctatgcaaacacctttcccataaagaaaccaaaccccatagtacagtgccttgtcctagtgttcacatgttcagctctgtttgtttagatgccaaggtttccattttcagggctataaaaagtattacttggaaatgaggcatcagaccaccagatgttaccgctcggttgaatgtgtccaccgtggagtggtttggtgacgctgtaaccattccacgccagtgacctctgctgggtcacagccactcaggaggggaagggtcaggatgagaggctgcagcctcgacacttggcgcggcctgatactgaaatagcgtctactcgtgcactgaataaaaacagaaacttgatcattttattcctgattagattttatcactctctgctaagacaatatagtctggagtataagtgggaaagcttgatttaaatactgtgaactctaataatgtggaaaatatttttcaactttaattttctgaagtataaattatttatgtaaattcattgtttttgcatatttcttaggacatgcatctttaagctttatcattgcccatatgtacagaaagagaataaagacatatgtttatggatgg

SEQ ID NO: 525 - DNA, 3817 bp, HOMO SAPIENS
cggccccggccccggctccggcgctgctcccaccgccgcggcaacggccccggcccacggaggcggctggacggacccccgacggttggacgtacggactctgcttcgagagtaggccatggacaccttcagcaccaagagcctggctctgcaggcgcagaagaagctcctgagtaagatggcgtccaaggcagtggtggccgtgctggtggatgacaccagcagtgaggtgctggatgagctgtaccgcgccaccagggagttcacgcgcagccgcaaggaggcccagaagatgctcaagaacctggtcaaggtggccctgaagctgggactgctgctgcgtggggaccagctgggcggtgaggagctggcgctgctgcggcgcttccgccaccgggcgcgctgcctggccatgacggccgtcagcttccaccaggtggacttcaccttcgaccggcgcgtgctggccgccgggctgctcgagtgccgcgacctgctgcaccaggccgtgggtccccacctgaccgccaagtcccacggccgcatcaaccacgtgttcggccacctagccgactgcgacttcctggctgcgctctacggccccgccgagccctaccgctcccacctgcgcaggatctgcgagggcctgggccggatgctggacgagggcagcctctgaaccccggcgccgcccaaccgcgcccctcgcgccttttggggctctcctgctgggcgcgggtggggtttgtgggtttttttccacctcttttctcccaatcggactccggccaaactcccctagacagatgggtgacctgtctcctttgagaggatgctgaggcatctgtagcagctgtttcaaacaccaatgtcacctctcctcctggcccccgcccaatggggagaggaatttggggccctactctggggaccacctttcacccgtttgtactttctgggccacgccgacccctgggtcgcttgatgtaaaagccaaaagctgctgcctcccacttggatcatgtcgcctgggattttcatccctcgcacaaggactacgggttcacacggtgaactgggggaagggaagtgttagggggcaagtcgcggcacccccccttccataaactcacgtcctaacccccaggacctcagaagatgatctgatttggaaataggatcattacagatggaattagttcagatgatctcatcttggagtagggtgggccccaattcaaggactggggtccttaaaaaaagggggcctggggcagggcgcggtggctcacgcctgtaatcccagcactttgagaggctgaggcgggcggatcacgaggtcaggagatcgagaccatcctggctaacacggtgaaaccccatctctactgaaaatacaaaaaattagctgggcatggtggcacatgcctgtagtcccagctactcgggaggctgaggcaggataatcacttgaaccaggaggaggaggttgcagtgagccgagattgtgccactgcactccagcctgggtgacagagcaagactctgtctcaaaaaaagaagcgggggagtgggggattgaggccacgtgcagtggctcactactctaattccagcactttgggaggccgaggcaggaagattgcttgaactcagaagttcaagaccagtctgggcaacatggtgagaccctcgtctctacaaaaaaaaaattatcgtggtgggccgggcgtggtggctcacacctgtaatcccagcactttgggaggctgaggcgggcagatcacaaggtcaagagatcgagaccatcctggccaacatggtgaaaccccgtctctactaaaaatacaaaaattagccgggcatggtgttgcgtgcctgtagtcccagctacttgggaggctgaggcaggagaatcgcttgaacctgggaggcgcaggttgcagggaggcggaggttgcagtgagccgagattgcaccactgcacttcagcctggtgacagagcgagactcgtctcaaaaaaaaaaaaaaaaaaaaaaaaaaaagtgactgtggtggtgcacacgtataatcccagctacttgagagatgacgagggaagatcacttgagcccaggagttaagaggctgcagtgaccgatgatcatgccactgcactccagcttgggtgagagtgggactctgtcttagaaagaaaaaaaaaagtatttggacacagacatgcatgcaaggaaggccaatgatgccggccaccaccaggagctgggagaggcccagggcagatccccttcagccttggagggacctagccctggccacaccttcatctcagacttgcggcccagagaactgaatgagaataaatgtgcgtgaagcccctcagtccacaggatgtggtactggaagcccccactcaagaaggctccagtgaatgctggcacgttcagccaggatgcctccgtgaagctggagacctctgccctgggtcgggaggggaaactgctccaatccagggactgccacatgggaggggacggagcgtgcccacctcccaggggtgaggggggacccacctgagatgtgtgcacattttatttatttattgttttgagacaaagtctcgctgtgtcacccaggctggagtgcagtggtgaaatctcggctcattgcagccccttccttccaggctcaagtgatcctcccacctcagccccgggtagctgggactacaggtgtgcacgagcacacccggctaatctttgtattttttgtagacagaaggtctcaccatgttgcccaggatggtctcgaactcctgggctcaagcgacctacctacctcggcctcacaaagtgtgcacattgtaatatcgtgatttcatatttggagaatcagcaaccaaccagccaaccatgttgcttttataagacagagctgagaaagcaaagcttggctgtcgtcttggctctggtaccacccacgagatgcgggcgattctcagctcagggcgtggaggcgtggtgtgggggagtctatttgccatttttgtttgtcagcagggggcaggggttctcaaagattgcaaaatgctgctgcaggtcaggaaggttattttgggtgcctgtgggggaggtgaaacaaggtcccatgactgttttgcagaaccttgtctgtggagggtagaggttgcggcaggggcctgtgggccttacttggtgagaaggtaggtctagctggctccattcagtatttgagacatttggaatttgtctgcatttaaaaccaagagatcacacacacctgtctggatttggagtttctcttgaaaactcgccagtccggccgtctgagcctgcactgacgcctggtgaagctgtgcaggggccgcccctctccctttcaccacagtcctctccactccctttcgcctctccctggcctgctgcactcactgataggaaattctgaccccagactcggagcagccttcccgtggttcggtttttgcttccgcgaaaaagccaaaggccttggccagagagccagctgttcctacctctaccccacgcttccaaggcaaccttctccacttatcttaggccgagagacagctcttcaagaacgtacatggatcctgattttctcacgaagtcccgatggaaccctgtgctgttgagacatcagtgtgtaaaactctctgtgtccctgttgggctgtccagacagtctggactcttgtaaatttgagatttaattaaaggaaacaaaccaaataggactgcggaacaatttaaataaaagcacacaccagcctggg

SEQ ID NO: 526 - DNA, 5446 bp, HOMO SAPIENS
cgggaacccgtcaggaaggacataaacaaaacaaacccgaggcagcatggagaggggccgtggcccctgcagcggaaccggacccagtccctgagccgcccctacacccacagacagcatcgcacagaattattttaaaaaaaagcagtgatccaagcaattgaattggaagcactctggggaaacctgctgtttattgtggaaatcatcttcgatcttggaattgaaagtaaagctggaaaggaatttacaaacaagaaaaaaaagaagtttggaatcggattcacaggatctgggcttggaaatgcctcagcctagtgtaagcggaatggatccgcctttcggggatgcctttcgaagccacaccttttcggaacaaactctgatgagcacagatctcttagcaaacagttcggatccagatttcatgtatgaactggatagagagatgaactaccaacagaatcctagagacaactttctttctttggaggactgcaaagacattgaaaatctggagtctttcacagatgtcctggataatgagggtgctttaacctcaaactgggaacagtgggatacatactgtgaagacctaacgaaatataccaaactaaccagctgtgacatctggggaacaaaagaagtggattacttgggtcttgatgacttttctagtccttaccaagatgaagaggttataagtaaaactccaactttagctcaacttaatagtgaggactcacagtctgtttctgattccctttattaccccgattcacttttcagtgtcaaacaaaatcccttaccctcttcattccctggtaaaaagatcacaagcagagcagctgctcctgtgtgttcttctaagactctgcaggctgaggtccctttgtcagactgtgtccaaaaagcaagtaaacccacttcaagcacacaaatcatggtgaagaccaacatgtatcataatgaaaaggtgaactttcatgttgaatgtaaagactatgtaaaaaaggcaaaggtaaagatcaacccagtgcaacagagccggcccttgttgagccagattcacacagatgcagcaaaggagaacacctgctactgtggtgcagtggcaaagagacaagagaaaaaagggatggagcctcttcaaggtcatgccactcccgctttgccttttaaagaaacccaggaactattactaagtcccctgccccaggaaggtcctgggtcacttgcagcaggagagagcagcagtctttctgccagtacatcagtctcagattcatcccagaaaaaagaagagcacaattattctctttttgtctccgacaacttgggtgaacagccaactaaatgcagtcctgaagaagatgaggaggacgaggaggatgttgatgatgaggaccatgatgaaggattcggcagtgagcatgaactgtctgaaaatgaggaggaggaagaagaggaagaggattatgaagatgacaaggatgatgatattagtgatactttctctgaaccaggctatgaaaatgattctgtagaagacctgaaggaggtgacttcaatatcttcacggaagagaggtaaaagaagatacttctgggagtatagtgaacaacttacaccatcacagcaagagaggatgctgagaccatctgagtggaaccgagatactttgccaagtaatatgtatcagaaaaatggcttacatcatggaaaatatgcagtaaagaagtcacggagaactgatgtagaagacctgactccaaatcctaaaaaactcctccagataggcaatgaacttcggaaactgaataaggtgattagtgacctgactccagtcagtgagcttcccttaacagcccgaccaaggtcaaggaaggaaaaaaataagctggcttccagagcttgtcggttaaagaagaaagcccagtatgaagctaataaagtgaaattatggggcctcaacacagaatatggtaatttattgtttgtaatcaactccatcaagcaagagattgtaaaccgggtacagaatccaagagatgagagaggacccaacatggggcagaagcttgaaatcctcattaaagatactctcggtctaccagttgctgggcaaacctcagaatttgttaaccaagtgttagagaagactgcagaagggaatcccactggaggccttgtaggattaaggataccaacatcaaaggtgtaatcagcctcattggaccactggtcagaaatgtctgcgttttgtcacgttatccattgtaaattttcattctgttttgcatgtcagttagcattatgtaaacatttacaattaggttacattgttttaagaactaagtagcataagtgaagcatgatccaaaatacttgattattgcattttcagagcataaaccatgattaaaactgctactggcatcagaattgaaaatcatatgtttaagtaaatgttaggtacagattacaaaaatctgttaaagcaaaacattttggaggagtgaaatagtaaaatgccaagtattgtggcagatttatgctctgaaccacacaaaaaaattgaggaagcatttttttaaacagtcggtttaaattgtttttagaattattgctttttgttctaattttccacaaccattaatctcacttgtatatggcacacccagcacttgtgcctgtgggccatattagatgttcattgtcagagctcaagatgatatatataaatatatatatatatatatatatatacacacacacacacaaatgtctgtgcaagtaagaaaaaaaaagcatattctttgtgccttgtattttggggaaactctaaaactggtaatattttgtatgatgaaaaccctaatgagaaaaaacaagatatatagatggaaaaattatggggtttaaatgtttttttgttccaactctttttcagattttttgaatgtatataggactatgttgaaatgtagatatatgccacagagtctgtgtattgtataaaaaacaaaacaaaaaacaacaaaaaaaagatggctctagaaaactcatatttcggtacttgaccggaagaagacaaatacttgcacattattgcgattgttttattttttgtaccaaagacaaatgcaactgatatggcaaactgccagtctaagtaaagttttgcacagcttacatgatactgtatgaatgtatgaaaaaaaaggagaaaaaaaagaaaaaaaaaggtcagggttagggatcttactgaactgtgaattttatttctgtttgggtccaattatctacagaaggagcatccatacatacaaatattattttgctgttcctctagttcgcttccatagtagataagttggtggccatttagatgtcttttatttctgcacttattgtaggaaattttaatatatttcattttagtaagctattgataaaatagtttttgactttgaaaattaaaatgtttatttagcttattgtagtatacttccaccagacaacaaaatagattatttttattgtattatgtatatatatatatgtaaagaaagaaaaaagctaaaaatatctaattctttagttgccacttttccgattgatgtattattgtgcatgtaatattttcaaagatcaacacaggctaaaacaaaaacaatttatagatttttatatttttgtacaggtattttcaaactagcttcttcaaacttaacatgtgacttattcttctatagtttctagaattgagaaacattaacacatttagtttttaggtgctcttttttgctcatataaaacagcttcattagtcagtgttttaactgtgttcaagctttacctcttgatgagaaatttcttatgtcaaggcagcattataaaccttcccccacagatttttccatcctgtctctcttactgttttattctcaaatcttgtgctttgaactctgaaaactggtggcttaaaaactaaaaaaagaaaaaaagcatatttagcaaggaaaaaaataccaaaaatttcaggcatagctgctggaaaaattatctatttctccattacccactgtaggatttcttttttaattatactttgactataaagtgtcaaagtataatttgttcttttcttttactttgttaccccatttgtaagctatagcatatgaagctatatatatagcttgtgaaggtttgatctagaacacccagtaacaaatgaacaatgttgcttacctgcttctttgacatcttaaaaaagaaatccaaggaggattgtaaggattgtcttaccaccttagctgaactgtgatgcacaagatttttctatgtgtttggtggaaatgtacctggtttgtacattcacgctaaacagatgataagctcaagtctgatggtttaatagaatgtaagttcatcgtttaaagcttttcctttttaggttggagaaggcaaaacacaggcttgcaagttggaagtatatgaagtcttgacagagtgtgtctggtaaattgaaaagtgtttcaaactatggcagttttgcaatcaggtgaaaatcacctcatgatattcagctgataaggtttataaaattgcccctttctagctgctctgttaggaattctggtttttgatacttttttcctgtctgcaaaccagaatttgattttttggtcttgcatttcaaaaaaaaaaagactttgaatctgtttagtagattccatatctttgagtttcagtgttttatatgtactacttaagttaaatagttaaaagcttttaaatagttgagctttttaatgttgacactttattttgtacctatttatatatgtatgtatatcttagaaaagcactttgttaaaaaaaaattgcattttatatgattcctgccatttgctgctaaatctgggctggtcagaatgctgcagcgatacttgatctatataaaaacctggcagtaaaatgtagagtgaaagttaaatcctcttgctgttttaactttatcataaagatgacataggcaagctgtgcagctttacattttaaccaggggactctgtggcatttaaaaccgtctagaaatggttgtactttaatgccagtaataatctgcttcctctattgtcattaaaatatatacgtttagtgtatcacacaaaccaatcttataagggtaatgtaaaaaccccaacaattgtacatgttctgtttttgaaaattgtggcatgtatttttgggtgaagatcattagagaagagttctctaaaggttttctgtgttcatacatggtatacagatagctcataatgaagtccagaatcttacttttaagtgaaggcattgtgaattcacctcaagtaaacccattgttccaaagcaattataaactttgactctagtactactatgatttaaaaaaaaa

SEQ ID NO: 527 - DNA, 3477 bp, HOMO SAPIENS
ctgtgtgtaggagggatttcggcctgagagcgggccgaggagattggcgacggtgtcgcccgtgttttcgttggcgggtgcctgggctggtgggaacagccgcccgaaggaagcaccatgatttcggccgcgcagttgttggatgagttaatgggccgggaccgaaacctagccccggacgagaagcgcagcaacgtgcggtgggaccacgagagcgtttgtaaatattatctctgtggtttttgtcctgcggaattgttcacaaatacacgttctgatcttggtccgtgtgaaaaaattcatgatgaaaatctacgaaaacagtatgagaagagctctcgtttcatgaaagttggctatgagagagattttttgcgatacttacagagcttacttgcagaagtagaacgtaggatcagacgaggccatgctcgtttggcattatctcaaaaccagcagtcttctggggccgctggcccaacaggcaaaaatgaagaaaaaattcaggttctaacagacaaaattgatgtacttctgcaacagattgaagaattagggtctgaaggaaaagtagaagaagcccaggggatgatgaaattagttgagcaattaaaagaagagagagaactgctaaggtccacaacgtcgacaattgaaagctttgctgcacaagaaaaacaaatggaagtttgtgaagtatgtggagcctttttaatagtaggagatgcccagtcccgggtagatgaccatttgatgggaaaacaacacatgggctatgccaaaattaaagctactgtagaagaattaaaagaaaagttaaggaaaagaaccgaagaacctgatcgtgatgagcgtctaaaaaaggagaagcaagaaagagaagaaagagaaaaagaacgggagagagaaagggaagaaagagaaaggaaaagacgaagggaagaggaagaaagagaaaaagaaagggctcgtgacagagaaagaagaaagagaagtcgttcacgaagtagacactcaagccgaacatcagacagaagatgcagcaggtctcgggaccacaaaaggtcacgaagtagagaaagaaggcggagcagaagtagagatcgacgaagaagcagaagccatgatcgatcagaaagaaaacacagatctcgaagtcgggatcgaagaagatcaaaaagccgggatcgaaagtcatataagcacaggagcaaaagtcgggacagagaacaagatagaaaatccaaggagaaagaaaagaggggatctgatgataaaaaaagtagtgtgaagtccggtagtcgagaaaagcagagtgaagacacaaacactgaatcgaaggaaagtgatactaagaatgaggtcaatgggaccagtgaagacattaaatctgaaggtgacactcagtccaattaaaactgatctgataagacctcagatcagacagaggtaagtgtattgtttctcactttgattagggctttttgttactgtttgacagtgcagcgtaagtatgcacagatgaagatggaactaagccgagtaagaagacatacaaaagcctcttctgaaggaaaagacagtgtagtcctgcaaaacattttgaggtacattgttttgtctcagctattttgtagcagactcgtgcccccattagtgtgcctctttggaaattatcgcccacatttgtaatatagtcgccattgaaaagttaattatcctttttttagggattttgatgtcatttcttttttttttttaataaaaaggttgaactgtttttttttttctttttggtattaagtccatcttgtgttggtacattggcagagacatatgctttaaaaacttaaatatttcggaggcacatgttggactactttgttttaattaaactgctagtatttctttgtcaaggatgtttctagttttttgctttattgccttgcattctaatgcagtttgttctgtaactcgagagccagtagcattggattgatggaagtgtagggtttatgaattattgcagctgactaccatacctcacacagcgttggtgttgtgagcggcccatgaaaagccaaattaaaaatcaaggattcagtcaaactaagcaggtactcatgccaggtactcctttctctacccacatccatgtttgaatgctattgcctgtgatctttacgcttaactgttgtgtatcttttttgttctttacaagaagtgcagaggggttttttgtgtattgcgtgaaaacttataaaacaaatgttaacagaatggaattttttttcaactgtatgtagggctgcagtggtggccagaattagatatctttaaagaattttaaatacaataaacacttcatattattcgccttgttacactcaatgcaattctcaagtctataagaggtatgtgcttaatatttcctactgtgtaggagaatttgcagtcagccataggtatgtaggaatagtcactcactggctgatacatttaaagcagcagtgtgaatagcaaggacagacaccttcaatttgtgaaatcaaagaactgatgcactatatagaacgaatttgggtttttaaagaaatattaaaagttaggtactgtaagtgttcttaaaacctgtaaacttcattctgtgggctagtggtgtgggacaaaatattcctaatgaaaggaagtaccaattagttgatttgttggtggcattccccttttgggaaagcaatgtaaggttatgtctgtgtatgtcattcacacttaggcaagcatacacaggcacatggctttaagaaccacactgatgccttgataattaaaaagaatacaagcattccatgtacacatgttaattagcagttagtgactgggccaacactttctcataaaaattggccttttacatgttgtctaattatcatttttccccaaattttgcgttgtaggactactgttcgaagatttttggaagaatactgagaacggcataaagtgaagatcgacatttaaaaaatgaggtgaaagaaagctatagtggcatagaaaaagtataaagctcagttagtttttttattattattattattaaaagttaattcaggactgatgtgacctaccagatttcagaacatgtgttaatagtatatatgccactgaaaacttaggtcctgtatcatacttttttctttaagactttttaagaaatattacttaaacatgtggcttgctcagtgtttaattgcaagttttcaatcttggactttgaaaacaggattaaacgttagtattcgtgtgaatcagactaagtgggatttcatttttacaactctgctctacttagcctttggatttagaagtaaaaataaagtatctctgactttctgttacaaagttgattgtctctgtcattgaaaagttttagtattaatctttttctaataaagttattgactctgaaaaaaaaaaaaa

SEQ ID NO: 528 - DNA, 4596 bp, HOMO SAPIENS
gcggagcctaggagtcagataccgcgagaagtagtctcccgaagaggttcggacaagcgcaggcgcactacaattcccgccctggccgcgaaggtggcacccgcagcgggaggcggggccgggccttcgggacaaagatcgcgagatttaatggcgagtcacagctacttcttcctggcagagaccggaagtgcggtccgcggagcgtctctggcgcttaccctgctttgggcctgcgttgctgctgctgctcctccgctcccccgtcgtatcgcctgccctggatcgaagtgatgggggatgccaaggaggccggagccgagggtccgccggccggggccgccgctcgaggagggctcagcctcctgtcccagggagaatccgaggaatcttctgcacagggatcagctttatttcttggaggcaatgaagtgaagagccgagctgtggtgaaatactcttctgcccctcctcgaacagcatttgcacgccttgaagagaaaacagacttgaaactcccacctgccaactggttacgagagagtgccaaactagggccagcaggaactaccattcttggcaacagcaagaaaagcaagccattttcaagctttggcatggcatatgactttattgattcagtgggaaatgatgtggatgttgtctctgactctgaaaacataaaaaaactcctgaaaattccctacagcaagtcgcacgtgagcatggcagtacaccgcataggaaggactctcttactagatgagctagatattcaagaactctttatgagatcgtctcagactggtgactggacatggttgaaagagttttatcaaagactcattgatcagaagtggcagaggaagaaaaagagcaaagagcactggtatcaaaaggcaattctttccaagtttttatattacagtatcaatggtgatggagccgctcagcctgtctcatccaccgcagaacagcaggaatcgtccagttcagatcagacaaatgattcggaaggggcttcatggcctgctcccttcgaaatgccttcttcagtttctgaagatcccagtgcttccagtcagggtcttaaaaatgattttgttcggaatattctatggacatttgaagatatccatatgttggtcggctccaacatgcccatatttggaggaggcagatacccagcagtcagcttacgtctcagggataacaacaaaccaattaatgtgctaactggaattgactattggttggacaacttgatatgcaatgtgccagagcttgtgatgtgttttcatgtaaatggaattgtacagaaatatgaaatgataaagacagaagaaattcccaatttggaaaattctaatttttctactaaagtcataaaagacattgcacagaatattttatcatttttgaaatctaattgtaccaaagaaggacatacctattggctctttaaagcaagtggcagcgatatagtgaagctctatgacctcactactctttgtgaagaaactgaagacaaataccaaaatccattcacaatgccggtagccattctcttgtacaaggttgcttgcaacatgatgatgaagaagaatcaaaataagaaacactatggaactattagaacattgcttcttaattgtctgaaattactggacaaaagtaggcatcctcaaattattgcttccgccaattacatgctttcagaactttttcaattggatgaacctaaaaaggaagaaaattcagaatctcctttaaatgagaattctgatgaaagttatagtgaagaggaggaagagatgcccgacagtgatgaaaatggatcctatagcaccagctctgatccatcagatgatagcaaagcagtagctataatcaagtctgttggagaactatcagtaccagaaaaatacaaatctattcatcaaatcagacccagttgtgcatttccagtttgccatgacacagaagagcgctgtagacttgtgcttagctatgttctagagggtttaaaatctgtcgatagcagcatcaaaaaagaaagcgaccttccagcagctgaccccagcactccaatcccgttaaaatatgaagatgaatcctcaagagggggtcccgaggggctagagaagcagatggccttgtttttggacaaaatgggctcccttcagaagggcaattattccagtcaatctggaatgatccctggctcttggcaacataaaatgaaacttcagctgattctcaagtcatcaaaggcctattatgttttgtccgatgctgccatgagtcttcagaaatacggaagagcattacgatacattaaattagctttgcaaagccatgatacttattgctgcctctgcaccaatatgctttccgaagtgctgttgtttctctctcaatatttgacactttgtggtgatatccaactaatgctggcccagaatgcaaataatagagcagcacaccttgaagagtttcattaccaaacaaaagaagaccaggagatcctgcatagccttcacagagagtccagttgccaaggatttgcatgggcaactgatttgtctacagacttagaaagtcaactctctgttagttgtaaatgttatgaggctgctaatgaaatcttgcagtttagtgacttgaaaagccaaaatccagaacactatgtacaagtattaaagagaatgggtaacattagaaatgaaattggtgtgttttacatgaatcaggctgctgcattacagagtgagagactagtgagcaaatctgtgtctgctgccgagcaacagttgtggaaaaaaagcttttcttgttttgaaaagggaattcacaactttgaatcaattgaggatgccaccaatgccgcccttttattatgtaacacgggaaggctcatgcggatttgtgcgcaggcccactgtggtgcaggggatgaactgaaacgtgaattttcaccagaagaaggcttgtattataataaggctattgattactatttgaaagcgctaaggtcattgggaacacgagacatacacccagctgtttgggattcagtgaactgggaattgtccactacttactttactatggcaactctacagcaagattatgctccgttatctagaaaagctcaggagcagattgagaaagaagtcagtgaggccatgatgaagtccctaaaatactgcgatgtggattcagtgtctgctcgacagcccctttgtcagtatcgagctgcaaccatccatcacaggctggcctccatgtaccacagctgtctgaggaatcaggttggtgatgaacaccttaggaaacaacaccgggtgctggcagatcttcattacagcaaggccgcaaagctgtttcagctgctgaaagatgctccctgcgaactgcttagagtacagctagagagagtagcatttgctgaatttcagatgaccagtcagaatagcaatgttggaaagttgaaaacactatctggggctcttgatataatggtgagaactgagcacgcattccagcttatccagaaggagcttatagaagaatttggccagcctaagagtggtgacgccgctgcagctgctgatgcttctcctagtctcaatcgagaagaagtgatgaaactcctcagtatatttgagtctcggttgtcatttcttctccttcagtccattaaactgctatcttcaactaaaaagaaaacaagcaataacatcgaagatgacacaattctcaaaaccaacaagcacatttactcccagcttttgagagcaactgcaaataaaaccgcgactcttctggaaagaatcaacgttatcgtccacctgctgggccagcttgccgccggcagtgcagcgagcagcaatgccgttcagtgactgcacagagccgtgtcccagacacgctgtcagtgccttcaacacggagccggtttgttcattcggtgctttgtttcattaaataatagggaaatatccatttaaaacaggtatatcagtggaaacacagagttattttaagtgacagacaaattacggttgagttctgtggcttcttcacttgaagtgctaacatcagaatcaaacttaaagcttccactatttatgtctttgagaagtatgtagtacctcggtattaacagacctgctgtgatgcagttacactttcacgtatttttgaagtatgtcaagctacacgggtctaagatatgattattttggataaaatgttactttggtcaagagaacttttatccagatgacattacaggttcaagtgggttaaggagacctcctgtacatctacagtgtttccttttaaattgtccagaaaaaaggtgtgttcttcataagcttcagtgcaggatttttcaaagacgagctgttgtgcaatttgctgtatttaatgcatgttctgaaaggattcacttttgactttatatgacagttgatcaagaacaggtactacccctttttttcatttcaaacttgaaactgtgaataaggtaagaaaactattttgaataaataaactatttatttaaaatgtcaaaaaaaaaaaaaaaaa

SEQ ID NO: 529 - DNA, 833 bp, HOMO SAPIENS
aaaggatgtacagaggatccccaaccgcctgcgaaacccaagccgccgcgtaggagcgtgcgttcgggccctcttctcccacctgttcgactccccatccccaggatgtcaacctcagtccctcaaggccatacctggacccaacgggtgaagaaagacgatgaggaggaggacccgctggaccagctgatctcccgctctggctgtgctgcctcccactttgcagtgcaggagtgcatggcccagcaccaggactggcggcaatgccagccacaggtgcaggcgttcaaggattgcatgagtgaacagcaggcgaggcggcaagaggagctgcagaggaggcaagaacaagccggtgcccaccactgagaccccaaaccacctatccccagtagatggccctgccaagaccagcacccagcaagattatagaggaagaaatcctaaatgctggtgtgggaggtctaaaacatggggagagtttttggatctggagttgagagccatgggtttggacatgactggcacaaacagctgtcatatgttcatggtcagatgtcatacattctcagctgtcttgttccaccagtatttaccaggaaaacaaagaatgtgttaagggatgctcccccaccccacatcttaagtcagtgtgccaagtactgagatgattttagggacattttattttaaattaaatttacaatctaatggtaaattgattacctaattagtgcctttctctttcatcacttgttctggatgtttcaatcagtttagtggaaggaaaaataaatggggaaactttttattcaaaaaaaaaaaaaaaaaaa

SEQ ID NO: 530 - DNA, 2835 bp, HOMO SAPIENS
agaaggccgcacgccccgggcatgcgcagcggctcgctcggaagctgcgacgccgagtttcactctggctgccttctcctgagagtcggagccacagccagagccctgcccaggccgagccggagctgcagcccgagcgcggtggtgccctcagccccgtcctcttgtcctcctcagcctcggtgccttggaatttgtgtcgctgagtcagcaagcctttcagatttgcccggtttttgttgtttgtggtttgtatcaagatgggaactcaaacaagtcattcctcctaaggagctggtgtcttcatccagaagggacagtttgtgccagctctccagagagaaaaggatctggtactgttctggagtggcctgtagcagacactgaaccaccagccagctgcatttgttgtcctggaagtcattgccaactctgccagtcacactggggtccccagagaagtcaagatctgccggaggcgctgggcaatgaccccgggactccaggccagaggggtctgaagctgtttgggaaagcagcgggactccttgggaagatggccatggccccaagcccttccctggtgcaggtgtacaccagccccgcggctgtggccgtgtgggaatggcaggacgggctgggcacctggcacccctacagtgccaccgtctgcagcttcatcgagcagcagtttgtccagcagaagggccaacgttttgggcttgggagcctggcccacagcatccccttgggccaggcagacccctcgctggccccttacattattgacctccccagctggacccagttccgccaggacaccggcaccatgcgggctgtgcggagacacctgttcccccagcactcagcccctggccgaggtgtcgtctgggagtggctgagcgacgatggctcctggactgcctatgaagccagcgtctgtgactatctggagcagcaggtggccaggggcaaccagctcgtggacttggcccccctggggtacaactacactgtcaactacaccacccacacgcagaccaacaagacttccagcttctgccgcagcgtgcggcgccaagcagggccgccttacccggtgaccaccatcatcgctccgccgggccacacaggcgtcgcctgctcttgccaccagtgcctcagtggcagcagaactggccccgtgtcaggccgctaccgccactccatgaccaacctccctgcataccccgtcccccagcaccccccacacaggaccgcttctgtgtttgggacccaccaggcctttgcaccgtacaacaaaccctcactctccggggcccggtctgcgcccaggctgaacaccaccaacgcctggggcgcagctcctccttccctggggagccagcccctctaccgctccagcctctcccacctgggaccgcagcacctgcccccaggatcctccacctccggtgcagtcagtgcctccctccccagcggtccctcaagcagcccagggagcgtccctgccactgtgcccatgcagatgccaaagcccagcagagtccagcaggcgctcgcaggcatgacgagtgttctgatgtcagccattggactccctgtgtgtcttagccgcgcaccccagcccaccagccctcccgcctcccgtctggcttccaaaagtcacggctcagttaagagattgaggaaaatgtccgtgaaaggagcgaccccgaagccagagccagagccagagcaggtcataaaaaactacacggaagagctgaaagtgcccccagatgaggactgcatcatctgcatggagaagctgtccacagcgtctggatacagcgatgtgactgacagcaaggcaatcgggtccctagctgtgggccacctcaccaagtgcagccatgccttccacctgctgtgcctcctggccatgtactgcaacggcaataaggatggaagtctgcagtgtccctcctgcaaaaccatctatggagagaagacggggacccagccccagggaaagatggaggtattacggttccagatgtcgctccccggccacgaggactgcgggaccatcctcatagtttacagcattccccatggtatccagggccctgagcaccccaatcccggaaagccgttcactgccagagggtttccccgccagtgctaccttccagacaacgcccagggccgcaaggtcctagagctcctgaaggtggcctggaagaggcggctcatcttcacagtgggcacgtccagcaccacgggtgagacggacaccgtggtatggaacgagatccaccacaagacagagatggaccgcaacattacgggccacggctatcccgaccccaactacctgcagaacgtgctggctgagctggctgcccagggggtgaccgaggactgcctggagcagcagtgacctcgcaccccagcacgcccgcctctggtggccaccccgctgccccatggctggctgggtggccaggcaggaagtgcccagcccgagaggctgggaggtttgttgagggtgtggggtgtgccccacctgaagccggggctccccctgcctgcctctctctcctcctcccctctgggaattgggcagccctgggcagttgtactcatgggggcttaggatgcagctacctcagtgcgcagggcccgtctgtcctctgggggctgcttcgggcccgcggtgctcggggcctggtgtggggcgagtagagacttccccagcctggacgggcgtgggttctgggtcagcttcttttacctcaattttgtttgcaataaatgctctatagccaaagccaaaaaaaaaaaaaaaaa

SEQ ID NO: 531 - DNA, 735 bp, HOMO SAPIENS
gctgtgaggcgccagtgcggagcgggcgggcgggcgggcgggcgggcggcgcgaggcggagcgcgggcggccggcgaaactccaagggcggaccgcggcagggagcgatcggcctcgggctgcgggagccggagaccgcggcggcggcggctgctgcagctgcaggaggagcccagggaacaccgcccctgcctgtgctctgcctcgggccatcgctcctccccagggcccagtgcggactcgcctccgtgaagtgtcacaccatgtctgaccggaaggcagtgatcaagaacgcagacatgtctgaggacatgcaacaggatgccgttgactgcgccacgcaggccatggagaagtacaatatagagaaggacattgctgcctatatcaagaaggaatttgacaagaaatataaccctacctggcattgtatcgtgggccgaaattttggcagctacgtcacacacgagacaaagcacttcatctatttttacttgggtcaagttgcaatcctcctcttcaagtcaggctaggtggccatggtgaaggtgtcagtggcggcggcagcgatggcaagcaggcggcgttgctgggactgttttgcactggagccagcatcaggatgtcctctccaatggctgtgctactgcatggactgtatactcgatttcatgtgtatgtcgcagtaaacaaaaccaaacctcaaaaaaaaaaaaaaaaaaaaaaaaaaaaaaa

SEQ ID NO: 532 - DNA, 1160 bp, HOMO SAPIENS
cgcgactacgctcataaaaggaaaaaaaagcgtgtgcggttctcgacgtgccgccaatcttcgaacgcaggtctgtgatcatccgcagactccgaaaaagggttcgaggaacgcgcctgctcccctcgtcgcagtttccagcccgacgagcttgttttgtcccggactcggtgcccctgtagacaatggccctcgtgtctgccgattcccgcattgcagaacttctcacagagctccatcagctgatcaaacaaacccaggaagagcgttcgcggagcgaacacaacttagtgaacatccagaagacccatgagcggatgcagacagagaacaagatttctccctattaccggacaaagctgcgtggcctctacacaaccgccaaggccgatgcagaggctgagtgcaacatccttcggaaagctctggacaagatcgcggaaatcaagtctctgttggaagagaggcggattgcggccaagattgccggtctctacaatgactcggagccaccccggaagaccatgcgcagaggggtgctgatgaccctgctgcagcagtcggccatgaccctgcccctgtggatcgggaagcctggtgacaagcccccacccctctgtggggccatccctgcctcaggagactacgtggccagacctggagacaaggtggctgcccgggtgaaggccgtggatggggacgagcagtggatcctggccgaggtggtcagttacagccatgccaccaacaagtatgaggtagatgacatcgatgaagaaggcaaagagagacacaccctgagccggcgccgtgtcatcccgctgccccagtggaaggccaacccggagacggaccctgaggccttgttccagaaggagcagctcgtgctggccctgtatccccagactacctgcttctaccgcgccctgatccatgcgcccccacagcggccccaggatgactactcggtcctgtttgaagacacctcctatgcagatggctattcccctcccctcaatgtggctcagagatacgtggtggcttgtaaggaacccaagaaaaagtgatgccgcctggcagactcgccatcccccaacgacacagggcaggacagcagaggacgtgctgggattaaacacattccccctctaaaaaaaaaa

SEQ ID NO: 533 - DNA, 1541 bp, HOMO SAPIENS
tccagcggaggagctctgggacacccttgtctagggaagaggtcttactggctgccctcacctgactttgtgtccccaggcccccagccatggccctgtccctgcctctgggccctagacttggctcagagcccctcaaccacccaccgggagcacctagagaggcggacattgttggatgcaccgtctgccccgcgtccggagaggagagcacgagcccagagcaggcccagaccctgggacaggactccttgggccctcctgagcacttccagggtgggccaaggggcaatgagcctgccgctcaccccccgagatggtcaacaccctcttcctacgaggacccagctgggggcaaacactgtgagcaccccatttctggcctggaggtactagaggctgagcagaacagcctgcacctgtgcctgctggggctgggccgccggctgcaggacctggagcaaggcctggggcactgggcattggcccagagtgggatggtgcagctgcaggccctccaggtggacctacgaggggcagctgagcgtgtggaggcgctgctagcgtttggtgaggggctggcacagcggagtgagcccagggcctgggcagccctggagcagatcctgcgggccctgggagcttaccgagactccatcttccggcggctctggcagctgcaggcccagctggtcagctacagcctggtgttcgaggaggccaacacgctggaccaggacttggaggtcgagggagactcggactggccaggacctggtggggtctgggggccctgggcacccagtagcctccccacttccacagagttggagtgggatccggcgggggacattgggggccttgggcccttgggacaaaagacagcccggacactaggagtgccctgtgagctgtgtggccagagggggccccagggcaggggacaaggccttgaggaagcagacacctctcactcccgacaggacatgctggagtctggcctcggccaccagaaacgcttagcacgtcaccaaagacactccctgctccggaagcctcaggacaagaagaggcaagcatctcctcatctccaggatgtgaggctggaggggaatccaggggcccccgatcctgcatccaggcagcctctgaccttcctccttatcctcttcctcctcttcctcctcctggtgggtgccatgtttctcctgcccgcgtcaggaggcccctgctgctctcatgcccgaatacccaggacaccctacctggtgctcagctatgtcaatggtcttcccccagtctgatgtgtgtaataaatggtcactgtcaaaggatgtgtgaagatactaggtgccttcatacccggaatctaggatgtggcctggatatgtctggatggacccttttgccttgagaacagaatacagaactgcatcagcccatcttgggtggggctgccccagaccctgacacaaagagtcaagcaccagttctttatttaggcgtggcaggggagccaggacgtgagctcaggaagggag

SEQ ID NO: 534 - DNA, 3541 bp, HOMO SAPIENS
acggaggagcgcggggagggcgaggggaggaggaggcgcccgcctggttccctgcaaagcggccttatttatctgggcacagcctcagcctccccggtgggaggcttggggcggccgatcctctcccaccggggagctcctttccgtgcgctgccgagggggcccggccaggacgggacgcggggcgcagggcgcggccgggccctgccggccagtccagcaccccggcggcccccgcgcgccgacgcccatgccgggctccccatgacgggaggtcgcccggcggacagcgtggcatgagccaggagcccgggccgagagcgtgccaggaagatgtcgagcccgggcatcgacggcgaccccaagcctccatgcttgcctcgaaacggtctggtgaagctgccgggccagcccaacggcctgggtgcggccagcatcaccaagggcacgccagccaccaagaaccgcccctgccagccaccacccccacccaccctcccaccacccagcctggctgctccactgtcccgggctgccctggctgggggcccgtgcaccccggcaggtggaccagcctcagccttggcacctgggcacccagcggagcggccgccgctggccacggacgagaagatcctcaatgggctcttctggtatttctcggcctgcgagaagtgtgtgctggcccaggtgtgcaaggcctggcggcgcgtgctgtaccagcccaagttctgggcaggcctcacgccggtgctgcatgccaaggagctctacaacgtgctgcctggtggcgagaaggagttcgtgaacctgcagggttttgccgccagaggcttcgagggcttctgcctggttggcgtctccgacctggacatctgtgagttcattgacaactatgcgctctccaagaagggtgtcaaagccatgagcctcaagcgctccaccatcacggacgcaggcctcgaggttatgcttgaacagatgcagggcgtggtgcgtctggagctgtcgggctgcaacgacttcaccgaggccgggctgtggtccagcctgagcgcgcgcatcacctcgctgagcgtgagtgactgcatcaacgtggccgacgacgccatcgcggccatctcgcagctgctgcccaacctggcggagctgagcctgcaggcctaccacgtgacggacacggcgctggcctacttcacggcgcgccagggccacagcacgcacacgctgcgcctgctctcctgctgggagatcaccaaccacggcgtggtcaacgtggtgcacagcctgcccaacctcaccgcgctcagcctctcgggctgctccaaggtcaccgacgacggcgtggagctcgtggccgagaacctgcgcaagctgcgcagccttgacctctcgtggtgcccacgcatcaccgacatggcgctggagtacgtggcctgcgacctgcaccgcctagaggagctcgtgctcgacaggtgtgtacgcatcacggacactggcctcagctatctgtccaccatgtcgtccctccgcagcctctacctgcgatggtgctgccaggtgcaagacttcgggctgaagcacctcctggccctggggagtttgcgcctcctgtctctggcaggctgcccgctgctcaccaccaccgggctgtcgggcctggtgcagctgcaggagctggaggagctggagctgaccaactgccccggggccacccccgagctcttcaagtatttctcgcagcacctgccccgctgcctcgtcattgagtagcgcgaggcccccgccccggtcgcgggaacccggccatgacctgggcgggggcgcggggcgccgccgagccccctcttcccgccttgcgctcgggggagcccccgcgcccccggcccagcgcgggaggcggggcgagccgagggaaagcccctccccgaccttcggtccctccgccctcccagccccgccccgggcaggggggcggcgggtgggcccgccccacgcacgcacgcacactcggggactttgtgcatgcccctcgtgcccgcactgcacgccgccctccgccacgccacagccacagccgccgccatcactcgctcgccctcccgcttggggggcggggctcggtccttgggggggctttgagctctccagactgtgcccttaccgccttccccgccacacccgctctgtcttcccactgtcccccccatcccgggcagggcccagtgggattgagggggctgggtcccccaggacacgggcccagaagagccccacgggcttcctgcatcttccaccgcaccatacctggagccctccgaggggtgtcaggggaaacaggccaccgccaaagccatggcccgccgccgagagcccaggccccacccgcacctcctcacccatccagcctgacccacgcggcctctcctcctccttgccgctgtgtggggcagtcccctgtccgccccaaaacccggccttggtccctggccaggctgagagaattgggcagggagagggcggaagggctggcgatcgcttggagtcattaacgtgatcccagctgactccggtcggcctcaacccaggggtggcgcaggcaccttgcaagcctcgagctgtagccaccctcaggcctgggaagaggcctgggccgacctcacacctcagcccttgcacccggccgggctcagttcaggcctgggcaccgagcttcaccctgggtgggtctcctcaggtggagtctgcagagtggacccagccaagggtcagggtcagcactgggtcagcgactccaatcttccagtggccagcacaccctagacaccccgaggagggagggctcctttctagcctgcccccccacccccacttcacccctccccagcttcccaaacttctgtctgcccaaatgggctctgaccgtgctctgtcggcccgagacatttggaagtcctgggggatgctggcaaatctcagctgttgctgaggagggggctgggaccccttcccatcccaaccttgagccccaggagataccgcgcccacacccaatcttgggacactccctatctggttggaagagagtaaccagtttccagagagccagagagtgagagagagaaagagagtgagagagagagagaaagagagagagagatgctgttgaatcagaaacagatcaacagcccaaagattttcctgtccctggagtgccagccccaggaagctccagggctgagtggtcaggagccagtttctccagcccctcctccccacaacccctagtggggaggggcagctgtccatttgcccaaagtattaatgcaactgaagctgtgatatttccaacgactgtaggaggaaaaattaaggggagagaggaaaacaaaaccaaccaacccctaaaatcattttcttattgtacataacgacctcattctcctgtatatgcggaagatataaccttatatttggtaagtgtttcttgtgctattttatcacgtgacctgtttataaaaatatatattaaaaaagttgt

SEQ ID NO: 535 - DNA, 1259 bp, HOMO SAPIENS
gccaggaccctggaaggaagcaggatggcagccggaacagcagttggagcctgggtgctggtcctcagtctgtggggggcagtagtaggtgctcaaaacatcacagcccggattggcgagccactggtgctgaagtgtaagggggcccccaagaaaccaccccagcggctggaatggaaactgggaggaggcccctgggacagtgtggctcgtgtccttcccaacggctccctcttccttccggctgtcgggatccaggatgaggggattttccggtgccaggcaatgaacaggaatggaaaggagaccaagtccaactaccgagtccgtgtctaccagattcctgggaagccagaaattgtagattctgcctctgaactcacggctggtgttcccaataaggtggggacatgtgtgtcagagggaagctaccctgcagggactcttagctggcacttggatgggaagcccctggtgcctaatgagaagggagtatctgtgaaggaacagaccaggagacaccctgagacagggctcttcacactgcagtcggagctaatggtgaccccagcccggggaggagatccccgtcccaccttctcctgtagcttcagcccaggccttccccgacaccgggccttgcgcacagcccccatccagccccgtgtctgggagcctgtgcctctggaggaggtccaattggtggtggagccagaaggtggagcagtagctcctggtggaaccgtaaccctgacctgtgaagtccctgcccagccctctcctcaaatccactggatgaaggatgtgagtgacctggagagaggggctgggagaaccaggcgaggaggggccaactgcaggctctgtgggaggatcagggctgggaactctagccctggccctggggatcctgggaggcctggggacagccgccctgctcattggggtcatcttgtggcaaaggcggcaacgccgaggagaggagaggaaggccccagaaaaccaggaggaagaggaggagcgtgcagaactgaatcagtcggaggaacctgaggcaggcgagagtagtactggagggccttgaggggcccacagacagatcccatccatcagctcccttttctttttcccttgaactgttctggcctcagaccaactctctcctgtataatctctctcctgtataaccccaccttgccaagctttcttctacaaccagagccccccacaatgatgattaaacacctgacacatcttga

SEQ ID NO: 536 - DNA, 10844 bp, HOMO SAPIENS
atagagacgaagaggtggcggcggccggagcgcccccggcctctgtcggctccgtaggctcaggtagacctggcgacgacggggctgcagctgcaggggctgagctggctgggcaagcgcgggccgcggaggaggtctcaggggtgaatcatttgatgtaaaagacttgactccataatctgcatctgtcctaatgctgtcatctggagtagagactcagccagttccacttgattcctccatgtctgccgtggtacaggaattatactctgaactcccagtaagtgtctccagagagcttcatgctgaccctgagccaagtgtgattccagatgtaaaacctggagcctcaagctctcttttaagtcagaatagggcattgcccttggagctgcagaggactcatgtggagagttgttgtgaagaaacctatgagaccttggatcatgggagtgagcctgggcgatgtgggctagtggactccacagcaggaggttctgtggcatctgggatcttggatagggcaaagagaagcgagagcatggagccaaaggtcttcagagatccagggggccaggcaggaattataagagaaccctctgagggagcaaaggaagatccacatcaacattccacagctgctgaagaaaagactagcccgagtcaggaggatctcctgatgcagtccagcaaagaactttcacatgtggacctccctgaagattttctaaggagcaaagaaggaaatgtacagattacagctgaaactctgctaaaatccgccgaagtacaaggtatgaaggtcaatgggactaagacggataataatgaaggacacaaaaatggcaatgtgagtaaagatctctcagctggatgcggtgaattccaagaagtagacaaaatcatgaccagtgatgaggtttcagaaaccagcacattagttaccccagaacctttaacctttgtggaccctgtattaacagaagcaactcctaaagaaaaagaatgtgaagaattaaaaagttgtccttggttgtcattaccaggaaacagtgccatttctaatgtggacaatgggaaggaagagttgtgtaaaccaaacctggtctgtgaagcagatgacaatcaccaacagcttcatggccaccataatgaacaacccagttctacacatgatagtcccacagccacaagccctttgaaagaaaattctgaagtttcatgtttcacatcagacttgtctggtccagaatccagaacaatatccttagaaaactgtggttttgaaggtggtggtttgctaaagagatctgctgaaaagacagacagttcttatttttataggggggatgatcaagggaagaacttggcttctagagaagaaaatgaggaacggcttttgattcctaggagtgaaagaggtggaccttttctttttaatgccagggaaccagaaaaggagattagtggtcgttgttctggtgaaaaagagcctgttgtttctccaaaggaaaatatccacaataactgcattcaagacagtctccatacagggaactctagttctttaatgcccaattcttttactgaagccacagaagtaatgttaaataaaaatgatttgaaaattactgtacacgttcaaggtaacttgacaaaccctgaggaccataaagaaacttttactaatatgagccatcctggtggacactctgaagaaagcagtttttcctccttgatgcagattgaagaggcaggacagacaacccctgtagagcccaatatattaagtaaatctttttacactaaagactgtaactccttagtcagcatccagagaaatctggaaggcaacacccagttaaatgaagcatcatgtaatgattttctgtttgaaagaaaatccattgtgagtttaatgccagaggatcaaataagtcctgtaagtgaggtattaaaacccaagcaaggtactgctctgttgctaccatccccagaatttgattacagacctgagtcagaaaaagttatacagacctcacatgatgatattccacttttagatgaacagagcatagcctgtgagatgaatgaactttcttgtaccaatgaactggttgtaaacaaagtagaaagtgaatgtgttttaaatcaacaagtgtcccttaattctcaagaacatgcaaatttgccaactgactctctactgcatttaaacaaagagatgcctttagcaacaggcagagatgcccatcagagccatcaccctccattagagggtagagcagatgtcattgctgatatacaaaccattcccattcagacaaaaataaaagacatctctccaccaggtaaccaaacctgtggtgcctcttcaaactgtcccaccttaaacatcaaaccagtaagcctagagagaaaaaaggaaatggctgattcaggaacaaaagctctacattccaggctgcgctcaaataagagagaagcagctggctttcctcaagtggtctctgtcatagaatgtcacagcgttcaatctcaggatatctctagctgtcatcgtgtaagaaaaaatgtatcccaggaaaacatgtgttctgcttctgctgctttcaagtccagcaaaatcagcctgcaagttgataactctttgataacaaaatatgaaaatgcatttcagcaccgtgatcactgctgccaaggaacaggacactctgtggaaaaaagcagctgtaaagtgagttacacatcacaggaaagggaacttgatgggaaagaaacgaatggcagccttccaggagataagatcagaaacaaaatggtagcaggcttgttaaatagtggaatttcaaacaaaaccattcacacctccagtagcatcaaactcagtgaggaagggctggaaggaaaggagcaggatgtatccaaagaaactgtattttgtaagtataacatctctgatcatgctatacaagaactaaaccagactgtaaacattccaggtcctgaaaaagtgttggaccagtctcctactgttatgttctccagttttaaaaatgtaaaatcagttgaaacactcgatcagaaggcagatgaagtccttgactgtcagagtaaccaaaacagaccagatgaatgcaaaagtgaaggtcagtcagccaaggagatgctaagtagtgaccagagagagactgtcaccgagcctcacggggaggtaaaccacaaccaaaaggatctgctggtcagctcaggcagtaataactcactaccttgtggtagtccaaagaaatgcaatttgaaaggagcctttgtcaagatgtctggttgtgatgagtccacagaaggtatggtagacatcgtctacacggactgtagtaataagcttgcagaaggtgtgctggacgtgaaggcatctaatctactggattgtggtgcaaggcaagagaaactggcatttcaagaggactccaggagtaccttgtctcggagagaactggatgctgcacatacaggaacaactggtcaggattcagatttcccagttactgctgcttctacagtggactttctcaaaataaaaaaatcatgtgaagaaaacgtatgcagatctttaaaagactgtgaaatggaaaagtgtccagactcttgtgcccatgagatggagtctgttgcagatcatgaaccaaataaaagaatattgggcagagtaaatttgtctttaaatgatagccattatggacagcaagataaaggaacatctctcagagaaacacaagaaatgactgaaggatcaagactagaaccaaactctgagtttggcaaagaaagtacctttggaatttcctcaaaagagtcgatgtcttgccatgatgaaagctctgtttccctaagaagcctgaaatccattgaaataatgccttctcaagaaaattcagaaactaatgttaacagtgaagaaactgacctgaaaaatctttgtaaaccaaaagatggtgaaatgctttgtgaaaatgtaaaggactgcacagtccttcctgagatgaaggaaatagtatcaagagattggagtaattctagtgacagagacagcgtatgtacctgtgtggaaaagaatgcttgcaaagcttgtcaccctcacgagaattcctctgacagacatttgcctttgacagtgaaaacagatattaaagtgaaaggagaagaaaccgaagagcatcagaggggacgactgggttacttaactgttggggagcaatctgaggagttggttaccagagaaactggcgatggcgatcccgtgagcaacatctctcagacccattttaaatgccgggggatacttaatcatgctgaaaaacagcagagccctgaggttttggactacatgttgcagaaagaagagaaatatatacgtcaacaaaaagcacatacgatatcgcaacagtgcatatcatctagtctgttgttagatgatgcacaaaatcagaaccaaccgaaggctgacaaagatgagtccaccatgatcaatgaaatcaccctagcaaagctggccaaggacagcattgtggcacagactcagaagttagaagaccagaaggaggaaaggttacatcatccattaaggaaggacactgagtcatgcacaagtccttgccttcttggtgcccctcggaaagcacaagacccctcctctgctgggtgtgatcaaatacatggtgcctttgcgaagaaaggagttcttcccttaaagaagcagccccatcgaacttgtaagaaagtttcctatcaggagcaaatcattgttgggagaaaaataggtaaaatcagaagttctgcctttttaaagagttcttccaatcccatccccacaaaagcgcacagacttctcagtttgtgtactctgtctgcacctacacgattagaacctgaaacagcacctaccaagagcttggttagtcacataccaaagcagatgtctacaccgtgccatcccttgaggagcctgaattttaggaagactaccaaagaatcagccttactaaacaagctgtccatccttgcctccaaactggccccagccatgaagactcagaagctaagataccgacggtgttcctctgaacttcttccaatggctaaaagctacaagcgcctcagatataaaagactcctggacggattttcatccagcacagagcagctgaatccatatttggcagctagtggatgggataagaggcctaacagtaagcccatggcactttattctctcgaatccatcaagatgaccttcatagatttgagcaacaagatgccgtccctgctgtttggttctgaaatcttcccagtatcctttcatgtgaaatcatccagctcagattgcacgactgagtcctcaaggacttttcctgagcactgtgctccggcaaggcttgccttaggagaggccctccagtgcccgtctcaacctcccaagtggaccttttctttcttcttgtcccacggttgccctgggatggcaacattcagggaagacactggcgtccatagtcagacccacactcaggctcctccccagcctccagctcctctccaagactatggaggcactgccatagtccagaccagagcagactgctctgtccttggccttcacacacttctagcactttgttccccaggatgttaccgaatctggacaaaaaaacggagcttctccagccacatgcctaccatgcagaggctcttcatgacccagtttacacagggcctgaaagggttacggtctccagcctccatagcagacaaggtcttctgttctctgccctactcggtgggcagagtcctatccatttggagccagcatggtccttctgtctgctccttcgaaatctcttctcttcattcccctcactgcaagcggcaaccaagtctgggcaccacaagcagccacaccatgttaccatatgtgcctcttccaggcatggaagctacatataacaccagcggcagtcagacgaggctggagcctccattccctgccttggtaccaaagtcttgcttggtagcagaatcagctgtcagcaagctcctgctttcagcctctgagttccaggttcgtggattggatgagctggatggtgtgaaagcagcatgcccctgcccacagagcagccccccagaacagaaagaggctgagccagagaagaggccaaagaaagtctcacagattcgcatccggaaaaccattcctaggccagatcctaatcttacccccatgggccttcctcgacccaaaaggttaaagaagaaggagtttagtttagaagagatatataccaacaagaattataaatctcctcctgcaaacaggtgtttagagaccatctttgaggaacccaaggaacgaaatggtacactaatctcaatcagccaacagaagaggaagcgagttctagaatttcaggattttacagtcccgcgaaagaggagagctcgaggcaaagtcaaggtggcaggcagctttaccagggcccagaaggcagctgtgcagagtcgagagctggatgctcttttgatacagaaactaatggaactggagaccttctttgccaaggaagaggagcaggaacaatcatcaggctgttgagaagcgattcagtttgagggtctcaattttagggtttttttgttttgttttgtttttgggttttttttttttttttggacctccttggaaaaggttgcctaattttgccctaccgccaaaccactcaaaaatgcacagtccatgaatttttacctatttcaaggtgcaacctttttagaaactggtgaaggagggtcctctacttttactgctgagtatagaacctcaggaatgctccctttctcctggaaatggacctgaacgacatccagccacctcctcagtctctgccatccacaggaggaagcagcagcctatcttcagtaacactaggattccaaggacacacaggatttgcacgtccatatgaaagttccgctttgtttacggtggtgctagaccaagattattagaaacgtggcctagggagggggacctggcgtcctgtcctgtgtggtctcactggctcatttcagtagttgaggaaagatgagctgttgtgttttcttatcttttgtctgcccaggacctattgatgtgagtgtatgtgagagtgtttgtgtgtgtgtggctttttcccatcgttttctcccctctgtgactgggtcactagtgccagaggagcccgtccaggccccattcgaagtaagttgcactttttaatgttgtggtgtggattattttcatttgttttattttcttttttgttgttgtttttgtactattattgctgcatgtgtggagcctttaaatgtgattttaaaacatttttttaaggagaaaaacaatacatgtcttaagaatacatgataggcatttgacccagttgatcgctgcatggaagagacatttttcctattcatgtgtttcaggcaatcccttccccatctccagcttctagtgtaactcattagagggagcactttttttcatctgggttctcattcttgcccaccaaatacatgtatttattttagtgatttaagtaagagcaggtttctctcccgatcattgaaaaactactatggttgggtgtggtcttaatggtttttatctgaaatggtgttaggtaacaaaattgagtacaacggcttgggcagtgatacaggctgacccacagtatttgtggctttccaggcagcccgcttcaagtgtggggagagagtcggggtcatgtttcagacccagagatgtgttcctgcagtgggatctcaaaaatccccagccagccttctttgagggccacctcattgtactctgggctcctacgtcacatctaccggaactgtcaaatgctggagttagccgagtttctgggtttgtgcctgcaggagtctgtgggcagagggatgctgtgggtcagcagcctcgaggtcttgttccttttccactgaagtcctgtgtgtccatatcctgctccccttcccctccttctctaggggtttctctttctctctcaaaacaagagtttagagaattaacattccatggctagtgagtgggatgcaaaagtcatcgtcaggacaccagcatcacctcttcatatcctcctgggagccactggcatggagcagccgccgatgggaaccgtcagagttctagggacatttccaagtcagtctattagagaagagtgagtggcacgtcctggaatgttggccaactctcctaggtttcttttgcttccccatttgctagtggatggggagatgggttgggggtggggggtctctatgtgccttgcttttgcaggttgacagtctatgccacactggagcagaaaaactgacatgagccagagggaaaagtgtgccacggctatgttctaggcccactgcctcagacatagcattgagacgagtgaaatacacacttggtcatccacggaggcttccaaggccatggccaaatacagttagaagagagccaggcttccgtaccagctctgaatgatgctaaccagattctgtcattctacatccactttgcccagactgtatagacacgacctatgtttcacctcaatacctctcccttcctgggacagggttcttagacactaaatgcttctctctgacttttttgcttaagggagtgggatgagtagtacattttgcccttgtccaggcatgtttaaggagctcctactggacaggttgcagactagcagtgagtcaacagagccctgtttgccagctctgttgccagtatagatgcagtgatgtggcggctatgtttcccagagacaacagtgggcacagctatagtgtcaccaacatggcagagatagtttcaactgtgcctgttacaggtgtggcactcgaaggaccagaagcagcggtttggaacatgggtaactgggagcagaggactggaagaaacagagctgggctccttccctgtcctgacaatgtaggagaggagttgttgtgaggccagccctgcccgtcgttgaaattctggacctaccctctagctaggtcccttcccctgctccaaagttgagaagggggccccactgcaaacttgaaattacttacctgaaggtgatgtatatacctaggctccagctgcgctcagccacacctgtcttaacattcagtttcggcactgagccagctgcagtgttgtcaggggtccccaggcccgtggtccctaaccacgatgggacatggtaatcggctgctggcacaccacctgcccagagctacaggaggtctggttctggggtggagttggtacagtttctgagtatgggaacttccctccccaagtggtgggaagttacagttaactacagcttactcaactatcacttccagaggtttagtgtttttaatatgggaaagaggagaaatctcaggtctaatcagggttctgcccatcagcttttcactgaaactttcaactgtgttttgttttttgtttttttttccatctttcagtttctagctgtgtttgccttctccctccgcgttccctcctctttttttgcttttggtctcctttccagcttcatgtctccatgagttcagctgtacctcatctcctgttaaagcagatcatgtccactttttcttactgaccttactctaagctacagtagctgagggaggtacggtgaagacatgtagcgtttgccttattcggagcctgaggagcccagaaacccatgctgtgaatcccaaaactcagcgctcctcaagagctgtgaaaatcatgatactttgtcacaattttgcctgaaagggtctttggcacgggctccagagccaacctgaggtccattccagatcccactatctgggcgtgagacctcccccgtggctccttccttgcccactgagccaagagcagcagggagcgtacaggacgggagcagcagatccaaggccgcggtgcagccaatgaatgcacggccgtcgctccgtctccaggctggaattccgtctcataatcaatgccatgtacattaagatctgcgaaagaccaacttttaggcagtgatacttttctcccattccctggggtggggggagtatgcagttggtgctttctgtaattcccttgttctgttttgtttctgtaagcttttcccctggtgtcatggaaaggacttcttaaataaccacattgtgggtggctgtatccaaagtttaaataattggccagaagtgcagagtatcctttcctggattcgtgtcagaaaagggctccttgccacaactgaacttactgtataaaaacctggctagggagatttaattttactaaaattacagtttaatgttaccgtctagccacaaatcaagcagcaaaagctattttgatgatgaaagggggtccccgttgagctggccatctagtgcagtgtgctctcagattccatgtttgttgattgtgtgtcttcacaagcccctctctggtgctgaattggatttgaattcttggtgagaggcctcagcatctccttgggctggtctgggccagtaaaaatagctgcctgacatgtttatatattatcatggtcagtagttcaatgaaatttgtacatttttggtaacattggtatacatgatgcccctgcagttccttttctgtttggtagtttgtgactctaagatttccactgttatgtgtgttaatttatgaaaataaatttttttgaaaacctttcaaaaaaaaaaaaaaaaaa

SEQ ID NO: 537 - DNA, 390 bp, HOMO SAPIENS
atgtctggtcgcggcaaaggcggaaaaggcttggggaagggtggtgctaagcgccatcgtaaggtgctccgggataacatccagggcattacaaaaccggctattcgccgtttggctcggcgcggtggcgtcaagcgcatttccggtcttatctatgaggagactcgaggtgtgcttaaggttttcttagagaacgttattcgagacgccgtcacctatacggagcacgccaagcgcaaaactgtcacagccatggatgtagtatatgccctaaaacgtcaggggcgcactctgtatggcttcggcggctgaatctaagaatacgcggtctcctgagaacttcaaaaaacaaaaacaaaaaaacccaaaggcccttttcagggccgctca

SEQ ID NO: 538 - DNA, 2931 bp, HOMO SAPIENS
aagcgaacttagcactggctacaccctcctcaattctggttggcgagatgcgctcttcccggaagtgacgcacaagtgccggcggaaggggaagtccaggagcatgggtggtttttttccccctaccgaggtccgtgaggtgtgtgctaaccaaggggcggctcacaaccgtgacagactgccattcctgagtctcttctggccatgggcccccggagccgtgagcgtcgggcaggcgcggtacagaacaccaacgacagcagcgccctcagcaagcgttccctggccgcgcgcgggtacgtgcaggacccctttgccgcgttgctggttccgggcgcggcgcgccgcgcaccgctcattcaccgaggctactacgtccgcgcacgcgccgtgaggcactgcgtgcgcgcttttttggagcagattggcgcgccccaggccgcgcttcgcgcgcagatcttgtctctcggcgctggcttcgactcgctctattttcgcttaaaaaccgcgggccgcctggcccgggctgcagtctgggaggtggattttccggacgtggcgcggcgcaaagcagaaaggattggagagacgccagagctgtgcgcgttaaccgggcctttcgagaggggggagcccgcgtccgcgctgtgctttgagagcgcagactactgcatcctgggtctggacttgcggcagctccagcgagtggaggaggccctgggcgccgcggggctcgacgcagcctcacccactctgctcctggccgaggcggtgctgacctacctcgagccggagagtgccgcggccctcatcgcctgggcagcccagcgttttcctaatgcccttttcgtggtctatgagcagatgaggcctcaagacgcctttggccagttcatgctgcaacattttcggcagctaaactcccccctgcatggcctggagcgttttcctgacgtggaggcgcagcggcgccgcttccttcaagctggctggaccgcctgcggtgccgtggacatgaatgaattctatcactgctttcttcccgcagaagaacgccggcgggtggaaaatattgaaccctttgacgaatttgaggagtggcatctgaagtgcgcccattatttcattctggcagcttctaggggagacaccctctcccacaccctagtgtttccatcctcagaggcatttcctcgcgtaaatcctgcttcgccttcaggggtattccctgccagcgtagtcagtagcgagggccaggtcccaaacctgaagagatatggccacgcctctgtcttcttgagcccagacgttattctcagtgcaggaggatttggagagcaggaggggcggcactgccgagtgagccagtttcacttgctctcaagagattgtgactctgaatggaaaggcagccaaataggcagttgtgggactggagttcagtgggatggacgcctttatcacaccatgacaagactctcagagagtcgggttctggttctgggagggagactgtccccagtaagtccagccttgggggttctccagcttcatttttttaagagtgaggataataacactgaggacctgaaagtgacaataacaaaggctggccgaaaggatgattccactttgtgttgttggcggcattcaacaacagaagtgtcctgtcagaatcaggaatatttgtttgtgtatgggggtcgaagcgtggtggaacctgtactaagtgactggcatttcctccatgtagggacaatggcttgggtcaggatcccagtggagggagaagtacctgaagcccggcattctcacagtgcctgcacttggcaagggggagcccttattgctggaggtctcggggcttctgaggagccattgaactctgtgctctttctgagaccaatctcttgtggattcctctgggagtcagtagacatccagcctcccattaccccaaggtactcccacacagctcatgtgctcaatggaaagctgttactggttggagggatctggattcattcctcctcatttcctggagtgactgtgatcaatttgactacaggattgagctctgagtatcagattgacacaacatatgtgccatggccattaatgttacacaaccatactagtatccttcttcctgaagagcaacagctcctgctccttggaggtggtgggaactgcttttcctttggtacctacttcaacccccatacagtcacattagacctttcttccttaagtgctgggcagtaaggactggactaatattcaggacccactaaagtagacaataaagttttccacaaataggatgaccctctagctatagatactgccactcctcctttccccatcctttttttcccttagcactattcagtgcaaaaagtgaaaaaggttggtaaaataggtaaaatacctagaaacaatcactacagaaaacagctgaagacagtggccatgcagtccgagaggagtagtggtctgcctctaattttctaatctaagttcgtttattgagttacagtggtctttagtaaagtaaaacaatttcccaatcccaggccttgtgatttgagatggtaccttagaaaaagttacacgcagttccgtggttgaatatatttgagatggtaccttagaaaaagtttcacgcagatccttggttgaatatagttgagggagcgtagtattgacaattcttcatgtaggaaacctgaaatgaacacagtcacagtttgattaaaacattgtcctgtttgttgcaacagaaaactcggatagttttaacaacaggaaacacttgtaggacttcctttaccaacatactttttaaatgttttgctattggttccatatttatttagatttataagtgtcaataaagcaaacttttgatgcctcaaaaaaaaaaaaaaa

SEQ ID NO: 539 - DNA, 2840 bp, HOMO SAPIENS
gtttttgtgcaggaacagcccctcccgtctttgtcctggcggtgagcacccagggctaagcttttgaacactttctttgtgtttggattcagcccaggcaatgcatatttgctttcatttcttcttgagcttgaggagctcctgggtgcaaatcttggaaaatgaggatctctgagcctttccaggccagctctttgttttgtagcagacaattgaggctttgaaaaggaaagtgggtgggggcaccccacaggtggccctcatcacccaattgccagtgcctgcaggctgcttcagcagaggcccagagtcaaagaggacttaaaaccagctgtcgtttctcccttagcttctgtgtatgagagaaacgacttctgtttttcaaagtaagaacaaggaggaatttgtttctaaaagaacattaaaacacaggctcgtggtctaaaagcaaatggttcagcaggatgttcagggccttaaagcacagtcagcaggactcagcatctcccagcacctgctctccggttgtcatggtaacatcatccccaacccaaccaccttgtccagccgagagacagcaatcataaggagggacctcggtttcccccgaggatcctgggcttcctttctgaaacgcttgcttctgagctcagcaaccaggaacaccaggccagcccatccccagcacctctgtggagatgagggacaaagtcctacagtccctcttcctgttctgatgagaaagggagggaagaaaacataccccgagcgcctgcaatatggtcatgacactttcaaaaagcctgtgctatggagtcatgatcagaaaccagagtgtggagagggtcagcagcctgcctcagagcagccagctaggcggggagtggtaaatttgggacttgtacccaggcatgactggctccgagcccagtgctccactctatggaatgttccctgggcctcagttgctttcctttcctttgcaggccgcgggctgctgccactctggcagctggtgagttagctggagggcaacattccaaagcaggggcagcatgctgctttcctcctgtgcccactcctgcggggaagtccgttgactcccaccgctgaagggagctggcaacaccaggatgaggtcccaggggacgggagcaggtacccactgtctgtctaccttcccactggaaaagcacggacaggccagcccttgcgggggcaggcagaggacagagttggctttgcgcggtctctgcctgctgagcagttccaattcctctcatgggagaaacaaggaggcagtcgcttgtgcatgttccagaagttttactggggaggaggaagcggacagaggaagctgtgtgtgcatgtgaaggggtgggcagggtgggagggatgcacgcgtatgtgagcatagcatgtgtgagtactacacacatctccatgcagaagcacaactgggcagccctggcttccagctctgggcttcagcacaacagacaccagcctgtggtctctcagaagccagggagaccacatcgggctcaggacgttttacccaaagtccagagtttttatgcctctccctggcattctccataaagaagggaaggtcagatgaccccttagatctgtgtcatctgggaatttccttgggctggtttagacacgatgccctctttttctcaggatagcagataacctgctttgaaagagggcttaattctgtgggtcctaaattttctcctttctctctctctttctgtgtgtgtgtgttgggaaaatggcaagtttccaataccagctttggaggaacgattacgttttccctccaatttcaagtccgaaagaccagagccctcattccaaagccccccacccagatggattttttcgtttcatttgtcatccgtcccatgggagggccccatgtctcctcagaacccatcctggaggcagcaggtcgggtagagtgagtttggcctgctcatgacctccacccctgagattgtgaacaaggatgtctggggcgatgctgagaatgtttttgaagctgctcccagatgacgctgatgatcacaccagattgagtgctgcgatcgccttgagtccaacctctgcataaacgaggttctcataaacaagttcactctaccctaagctaagtctatgtgagcaaacccacttcatcctttgtacctggagacctggttacactaacctgatactgacctgttcatgtagctggaatggtgtgtttcatgcagtgtggaccaagcaatggcatggggtgtgtgtgtgtgtgtgtgtgtgtctgtgtgtgtgtgtttgtgtatgcgttcacacttgtgtgtgtatatgtgcatgtagatgctgcataaatgatttttgatgtcaaagacaaacacattccattgttttaaatattctattatgtaaacaatacgcagagggaccatatctactcttgtcatattatttgtgatggtaaaacatgcatttgcaataaattaagctttctgggaaggcaagcagtattggagccaaacgactgtctcggaacatgtgtgtgttatctcggttcatatcaagtccaaagctaatggagccttccccgccatccagggaggaacaccaggaccccggagtttcttcttagtgctatattttaaagttgcattgacgttttcctccccttccttttgtgcaagttggaagtagcagtgttctaaaagatggtttgacgtttttgctgttgttttatgtttttaaaaatgtatctgctttgtgtttggaaataaaaatctctattttggtctatgaaaaaaaaaaaaaaaaaa

SEQ ID NO: 540 - DNA, 3007 bp, HOMO SAPIENS
aaggagagagggagggcggagggcggaggggcggcgggaggagggcggggaggagcgctcttcctggttgggccctgccctgagctgccaccgggaagccagcctcagggactgcagcgacccccaaacacccctcccccaggatgtcggaggagatcatcacgccggtgtactgcactggggtgtcagcccaagtgcagaagcagcgggccagggagctgggcctgggccgccatgagaatgccatcaagtacctgggccaggattatgagcagctgcgggtgcgatgcctgcagagtgggaccctcttccgtgatgaggccttccccccggtaccccagagcctgggttacaaggacctgggtcccaattcctccaagacctatggcatcaagtggaagcgtcccacggaactgctgtcaaacccccagttcattgtggatggagctacccgcacagacatctgccagggagcactgggggactgctggctcttggcggccattgcctccctcactctcaacgacaccctcctgcaccgagtggttccgcacggccagagcttccagaatggctatgccggcatcttccatttccagctgtggcaatttggggagtgggtggacgtggtcgtggatgacctgctgcccatcaaggacgggaagctagtgttcgtgcactctgccgaaggcaacgagttctggagcgccctgcttgagaaggcctatgccaaggtaaatggcagctacgaggccctgtcagggggcagcacctcagagggctttgaggacttcacaggcggggttaccgagtggtacgagttgcgcaaggctcccagtgacctctaccagatcatcctcaaggcgctggagcggggctccctgctgggctgctccatagacatctccagcgttctagacatggaggccatcactttcaagaagttggtgaagggccatgcctactctgtgaccggggccaagcaggtgaactaccgaggccaggtggtgagcctgatccggatgcggaacccctggggcgaggtggagtggacgggagcctggagcgacagctcctcagagtggaacaacgtggacccatatgaacgggaccagctccgggtcaagatggaggacggggagttctggatgtcattccgagacttcatgcgggagttcacccgcctggagatctgcaacctcacacccgacgccctcaagagccggaccatccgcaaatggaacaccacactctacgaaggcacctggcggcgggggagcaccgcggggggctgccgaaactacccagccaccttctgggtgaaccctcagttcaagatccggctggatgagacggatgacccggacgactacggggaccgcgagtcaggctgcagcttcgtgctcgcccttatgcagaagcaccgtcgccgcgagcgccgcttcggccgcgacatggagactattggcttcgcggtctacgaggtccctccggagctggtgggccagccggccgtacacttgaagcgtgacttcttcctggccaatgcgtctcgggcgcgctcagagcagttcatcaacctgcgagaggtcagcacccgcttccgcctgccacccggggagtatgtggtggtgccctccaccttcgagcccaacaaggagggcgacttcgtgctgcgcttcttctcagagaagagtgctgggactgtggagctggatgaccagatccaggccaatctccccgatgagcaagtgctctcagaagaggagattgacgagaacttcaaggccctcttcaggcagctggcaggggaggacatggagatcagcgtgaaggagttgcggacaatcctcaataggatcatcagcaaacacaaagacctgcggaccaagggcttcagcctagagtcgtgccgcagcatggtgaacctcatggatcgtgatggcaatgggaagctgggcctggtggagttcaacatcctgtggaaccgcatccggaattacctgtccatcttccggaagtttgacctggacaagtcgggcagcatgagtgcctacgagatgcggatggccattgagtcggcaggcttcaagctcaacaagaagctgtacgagctcatcatcacccgctactcggagcccgacctggcggtcgactttgacaatttcgtttgctgcctggtgcggctagagaccatgttccgatttttcaaaactctggacacagatctggatggagttgtgacctttgacttgtttaagtggttgcagctgaccatgtttgcatgaggcagggactcggtcccccttgccgtgctcccctccctcctcgtctgccaagcctcgcctcctaccacaccacaccaggccaccccagctgcaagtgccttccttggagcagagaggcagcctcgtcctcctgtcccctctcctcccagccaccatcgttcatctgctccgggcagaactgtgtggcccctgcctgtgccagccatgggctcgggatggactccctgggccccacccattgccaagccaggaaggcagctttcgcttgttcctgcctcgggacagccccgggtttccccagcatcctgatgtgtcccctctccccacttcagaggccacccactcagcaccaccggcctggccttgcctgcagactataaactataaccactagctcgacacagtctgcagtccaggcgtgtggagccgcctcccggctcggggaggccccggggctgggaacgcctgtgccttcctgcgccgaagccaacgccccctctgtccttccctggccctgctgccgaccaggagctgcccagcctgtgggcggtcggccttccctccttcgctccttttttatattagtgattttaaaggggactcttcagggacttgtgtactggttatgggggtgccagaggcactaggcttggggtggggaggtcccgtgttccatatagaggaaccccaaataataaaaggccccacatctgtctgtg

SEQ ID NO: 541 - DNA, 2184 bp, HOMO SAPIENS
ctatgctttctcatccggccggcttgctttcccctgcggtcgtccagactattgggcgctagcgagacgaactattggtacggggctagagaggaaggctttgggattgccggggagcagcgagcgaccgacttccgtttccagttaccaaggcacgaggatccggtgttccaacccagggggaaaaatgcggcctttgactgaagaggagacccgtgtcatgtttgagaagatagcgaaatacattggggagaatcttcaactgctggtggaccggcccgatggcacctactgtttccgtctgcacaacgaccgggtgtactatgtgagtgagaagattatgaagctggccgccaatatttccggggacaagctggtgtcgctggggacctgctttggaaaattcactaaaacccacaagtttcggttgcacgtcacagctctggattaccttgcaccttatgccaagtataaagtttggataaagcctggtgcagagcagtccttcctgtatgggaaccatgtgttgaaatctggtctgggtcgaatcactgaaaatacttctcagtaccagggcgtggtggtgtactccatggcagacatccctttgggttttggggtggcagccaaatctacacaagactgcagaaaagtagaccccatggcgattgtggtatttcatcaagcagacattggggaatatgtgcggcatgaagagacgttgacttaaaacgaagccattccaaggacagacggctgtatggaaaggccgagctttgtttcctgtgtttgtgtggactccaccatcatgttgaattttgtcaacactctggcctcttcagggacttcttatttactgtactctctatcactgacaaatgcaggctggattcttattatatacagagatggctcaaaaatggggtttcagatctttgtgacgaaatagaatactgtttcatatttgaatcagagggcttcttgttctgagaaataggttcaaaatcattggaaccaggaacaagaatagcttattgttatctgtgataacactgttttctaaacacaaggattttcttttttattaatatgcaacatagacattgccataacagaataataaaccacatgtggggttttaaaaatgaaatttggctaataggagcaattcagctatttttctatacagtaattggtgtgtggtatagaagaaaaacgggttcaaaccccacttctgccacctaccagctatatggccttgaatgagtcattcagctttaataaggttcattttcttctgtttaaaaagacacaaaacttgaaaatcagctttggccatctacctgagaattagaaagtctgatttttggaattagaaatcatgattgtaggctgggcacagtggctcgcgcctgtaatcccagcactttgggaggccaaggcggacggatcacttgaggttaggagtttgagaccagcctggccaacatggtgaaaccccatctctactaaaaaaaaaaaaaaaattaggtgtggtgacacatggctgtggtcctagttacttgggaggctgaggcaggagaatggcttgaactggggaagcagagcttgcagtgagccaagatggtgccattgcactccagcctgggcgtgacagagtgagactccatctgattgtaaagcatctagtacagtgtacagtgccttggaaatgataggtatggaataaatggtaattatttttatattatatatattatgtattcctgttattaagtgtagagttttatgagtataatttgattttattaccttcttttttacaagctgttttctcagtatttttcttggatgggatgacgctaggctggaaagtttttttcatcactatgattttataaaacaattttttctatgaacctttacttacttgactggattggactaaaagcactgatcagaggccacgacataaaaattcagtccctttgtccttccccgtgcctcccaaagttactttaagatccttagaatatttctttaaatattttatagacaaaaaatttaaagactatctgtattgcaaaattaaactatttctttaatgaatatattgcttattttaagttccaaaggtgaagtctttaagaataaaacattaccaactcctgcttttatatgtaa

SEQ ID NO: 542 - DNA, 1580 bp, HOMO SAPIENS
aggctgagccgtggccgccacagcccatcgtaatgccgcatggtgcttggcactccagagagccaataggaatgaaagaattcatttgaatcggccaatgccggcgggttagggggcgggggttgaaaaccctataaaggcgtcgatcggccggacaggcggcagcggcggctcctgcagcggtggtcggctgttgggtgtggagtttcccagcgcccctcgggtccgaccctttgagcgttctgctccggcgccagcctacctcgctcctcggcgccatgaccacaaccaccaccttcaagggagtcgaccccaacagcaggaatagctcccgagttttgcggcctccaggtggtggatccaatttttcattaggttttgatgaaccaacagaacaacctgtgaggaagaacaaaatggcctctaatatctttgggacacctgaagaaaatcaagcttcttgggccaagtcagcaggtgccaagtctagtggtggcagggaagacttggagtcatctggactgcagagaaggaactcctctgaagcaagctccggagacttcttagatctgaagaaaatgtggacacagacttgccaggcagcctggggcagagtgaagagaagcccgtgcctgctgcgcctgtgcccagcccggtggccccggccccagtgccatccagaagaaatccccctggcggcaagtccagcctcgtcttgggttagctctgactgtcctgaacgctgtcgttctgtctgtttcctccatgcttgtgaactgcacaacttgagcctgactgtacatctcttggatttgtttcattaaaaagaagcactttatgtactgctgtcttttttttttttcttttgaagaacaggtttctctctgtccttgactcttgggtctgtgggccatggcatgagtgttttctagtagtagattggagggaaagctttgtgacacttagtactgtgtttttaagaagaaataatttggttccagatgtgttagaggatcttttgtactgaggtttttaacactttacttgggtttaccaagcctcaactggacagaccataaacagtccacaggcaccgttcctgccaggccccaacccacagggagtctctccgcagagccttcttggtgttgccctaacttgccagtggcctttgctcagagcctcctcctgtgacatgtgaacaatgaagaggcctgcgcctcctgccttgccgcctgcaaagcaaagaaactgccttttattttttaaccttaaaaagtagccagatagtaacaagactggctggctgatgagcaaagcctttgctctcacgcagaggaaggcttggatgtacaatgaaactgcctggaactaaaagcagtgaagcaagggaggcaatcacactgaagcgggtcttcctccaggaacggggtcccacaggcgtgttgttttaaataacctgatgctgtgtgcatgatgctggtgcttgaccatgaaaggaaagtctcatccttaaaatgtgttgtacttcacaatcctggactgttgcttcaagtaaacaatatccacattttgaaaca

SEQ ID NO: 543 - DNA, 1326 bp, HOMO SAPIENS
ccgcccctctgccccagtcactgagccgccgccgaggattcagcagcctcccccttgagccccctcgcttcccgacgttccgttcccccctgcccgccttctcccgccaccgccgccgccgccttccgcaggccgtttccaccgaggaaaaggaatcgtatcgtatgtccgctatccagaacctccactctttcgacccctttgctgatgcaagtaagggtgatgacctgcttcctgctggcactgaggattatatccatataagaattcaacagagaaacggcaggaagacccttactactgtccaagggatcgctgatgattacgataaaaagaaactagtgaaggcgtttaagaaaaagtttgcctgcaatggtactgtaattgagcatccggaatatggagaagtaattcagctacagggtgaccaacgcaagaacatatgccagttcctcgtagagattggactggctaaggacgatcagctgaaggttcatgggttttaagtgcttgtggctcactgaagcttaagtgaggatttccttgcaatgagtagaatttcccttctctcccttgtcacaggtttaaaaacctcacagcttgtataatgtaaccatttggggtccgcttttaacttggactagtgtaactccttcatgcaataaactgaaaagagccatgctgtctagtcttgaagtccctcatttaaacagaggtcaagcaataggcgcctggcagtgtcaagcctgaaaccaagcaataccgtcatgtttcagccaagcccagagccctaagattacaaacaactatggccggaacctcctcagctctccctctgcagagttccctaccctaagagaatgttaccacctgaacagtcctcggtgaatctgagaggagaggatggggtaaggcagaagcaccagctgtactactagaagggagcttttggtggtagatcccctggtgtctccaacctgactaggtggacagagctcaaagaggccctcttaccgctagcgaggtgataggacatctggcttgccacaaaggtctgttcgaccagacatatcctagctaagggatgtccaaacatcagaatgtgaggccaaccttctatcagagttaaacttttgacaagggaacaaatctcaaactgatccatcagtcatgtagctagctgtagagcttgcaacttaatagcagcagctgcccaatgccatgtgaagtaacaaactggtttttggtttttttttccccttcagttttaatgttatgtgtaatgtatttaaacccttatttaaataaaacttgttttcagaaata

SEQ ID NO: 544 - DNA, 1354 bp, HOMO SAPIENS
gcgcggcgtctgcgcagctgccagcgcctttaagcccgggctcgcgctctcggaccgtgctttcgccgcctgggagccgtccggcgcagcagtttctaggtccccactgtccccgccgtcccgccccttcgcgtcccgggaaccggctggcttccgagccgcactcgccgatcctccaggcatgccccgctacgagctggctttaatcctgaaagccatgcagcgggttgtttacattcagagctctatcaataagaggaatacatattacagtgaattcgacaaccgcacaagttggcagttgataggtatatcgagaacagccagagactgctgctactttgaaacgtacgatagaggccctgatggacagaggagcaatagtgagggacttggaaaacctgggtgaacgagcgcttccttataggatctctgcccacagtcagcagcacaacagaggcgggtatttcttggtggatttttatgcacccaccgcagctgttgaaagcatggtggagcacttgtctcgagatatagatgtgattagagggaatattgtcaaacaccctctgacccaggaactaaaagaatgtgaagggattgtcccagtcccactcgcagaaaaattatattccacaaagaagaggaagaagtgagaagattcgccagattttagccttatatgtaattccttcacatttgggcagcatggacgagaaggaagaatttgcaagtttggcctttatataagcatgtgttgcaggtgctgtttgatttttctaaggtatttttagcccttgatcccctttgcttgcgagaggtggggaactgctcactgacagcttctctgtaacctgcagtaccagtggatcgttcttgattttgttttcattagtgtcatttctttgtcattgaggacttttccccttacaacagtaacaccattttttgaagagcaaaacttataatacctcctgggattgtgagctagtcattcagcctgtgtaaccatgtggaaataaaaattgacgaccaatgtattatatggacaacttttgctttgagtaataaacttgattgtaggaatgtgggaggtgttttgtccctttacttacccagtgcagtgcacttccagggccccgcagctccagtctagctggcagtgcctggcagtgtcggggaggcattacccagtacccactgaggtccagagccggggtggggcaggggaggaggggtgtctgtctgttccttactgggcacgccacaaaatcagtgacttttccctgcacacctcacttgtcattgtggtttgtgctgctctttgtggtgggacgtgtgttctggtgcagtt

SEQ ID NO: 545 - DNA, 632 bp, HOMO SAPIENS
gcggccgcggccaatcggagccgctcttgctgcgacgcagcggtcggaagcggagcaaggtcgaggccgggttggcgccggagccggggccgcttggagctcgtgtggggtctccggtccagggcgcggcatgggcgtcctggccgcagcggcgcgctgcctggtccggggtgcggaccgaatgagcaagtggacgagcaagcggggcccgcgcagcttcaggggccgcaagggccggggcgccaagggcatcggcttcctcacctcgggctggaggttcgtgcagatcaaggagatggtcccggagttcgtcgtcccggatctgaccggcttcaagctcaagccctacgtgagctacctcgcccctgagagcgaggagacgcccctgacggccgcgcagctcttcagcgaagccgtggcgcctgccatcgaaaaggacttcaaggacggtaccttcgaccctgacaacctggaaaagtacggcttcgagcccacacaggagggaaagctcttccagctctaccccaggaacttcctgcgctagctgggcgggggaggggcggcctgccctcatctcatttctattaaacgcctttgccagctaaaaaaaaaaaaaaaaaaaaaaaaaaaaa

SEQ ID NO: 546 - DNA, 934 bp, HOMO SAPIENS
agctcagcctcagtccccgcagcttgtgcggcggcgtcggcaccatgaggcgagggccccggagcctgcggggcagggacgcgccagcccccacgccctgcgtcccggccgagtgcttcgacctgctggtccgccactgcgtggcctgcgggctcctgcgcacgccgcggccgaaaccggccggggccagcagccctgcgcccaggacggcgctgcagccgcaggagtcggtgggcgcgggggccggcgaggcggcgctgcccctgcccgggctgctctttggcgcccccgcgctgctgggcctggcactggtcctggcgctggtcctggtgggtctggtgagctggaggcggcgacagcggcggcttcgcggcgcgtcctccgcagaggcccccgacggagacaaggacgccccagagcccctggacaaggtcatcattctgtctccgggaatctctgatgccacagctcctgcctggcctcctcctggggaagacccaggaaccaccccacctggccacagtgtccctgtgccagccacagagctgggctccactgaactggtgaccaccaagacggccggccctgagcaacaatagcagggagccggcaggaggtggcccctgccctccctctggacccccagccaggggcttggaaatcaaattcagctcttcactccagcatgcacatgccctctttctgggaccaggctaactctgcagaagcacagacactacagaccacagcattcagcccccatggagtttggtgtgcttgcctttggcttcagacctcaccatctttgacagcccttgaaggtggtagcccagctcctgttcctgtgccttcaaaaggctggggcactatgagtaaaagaccgcttttaaaatggggaaggcaccattaagccaaaatgaatctgaaaaaagac

SEQ ID NO: 547 - DNA, 2011 bp, HOMO SAPIENS
gccacacggtctttgagctgagtcgaggtggaccctttgaacgcagtcgccctacagccgctgattccccccgcatcgcctcccgtggaagcccaggcccgcttcgcagctttctccctttgtctcataaccatgtccaccaacgagaatgctaatacaccagctgcccgtcttcacagattcaagaacaagggaaaagacagtacagaaatgaggcgtcgcagaatagaggtcaatgtggagctgaggaaagctaagaaggatgaccagatgctgaagaggagaaatgtaagctcatttcctgatgatgctacttctccgctgcaggaaaaccgcaacaaccagggcactgtaaattggtctgttgatgacattgtcaaaggcataaatagcagcaatgtggaaaatcagctccaagctactcaagctgccaggaaactactttccagagaaaaacagccccccatagacaacataatccgggctggtttgattccgaaatttgtgtccttcttgggcagaactgattgtagtcccattcagtttgaatctgcttgggcactcactaacattgcttctgggacatcagaacaaaccaaggctgtggtagatggaggtgccatcccagcattcatttctctgttggcatctccccatgctcacatcagtgaacaagctgtctgggctctaggaaacattgcaggtgatggctcagtgttccgagacttggttattaagtacggtgcagttgacccactgttggctctccttgcagttcctgatatgtcatctttagcatgtggctacttacgtaatcttacctggacactttctaatctttgccgcaacaagaatcctgcacccccgatagatgctgttgagcagattcttcctaccttagttcggctcctgcatcatgatgatccagaagtattagcagatacctgctgggctatttcctaccttactgatggtccaaatgaacgaattggcatggtggtgaaaacaggagttgtgccccaacttgtgaagcttctaggagcttctgaattgccaattgtgactcctgccctaagagccatagggaatattgtcactggtacagatgaacagactcaggttgtgattgatgcaggagcactcgccgtctttcccagcctgctcaccaaccccaaaactaacattcagaaggaagctacgtggacaatgtcaaacatcacagccggccgccaggaccagatacagcaagttgtgaatcatggattagtcccattccttgtcagtgttctctctaaggcagattttaagacacaaaaggaagctgtgtgggccgtgaccaactataccagtggtggaacagttgaacagattgtgtaccttgttcactgtggcataatagaaccgttgatgaacctcttaactgcaaaagataccaagattattctggttatcctggatgccatttcaaatatctttcaggctgctgagaaactaggtgaaactgagaaacttagtataatgattgaagaatgtggaggcttagacaaaattgaagctctacaaaaccatgaaaatgagtctgtgtataaggcttcgttaagcttaattgagaagtatttctctgtagaggaagaggaagatcaaaacgttgtaccagaaactacctctgaaggctacactttccaagttcaggatggggctcctgggacctttaacttttagatcatgtagctgagacataaatttgttgtgtactacgtttggtattttgtcttattgtttctctactaagaactctttcttaaatgtggtttgttactgtagcactttttacactgaaactatacttgaacagttccaactgtacatacatactgtatgaagcttgtcctctgactaggtttctaatttctatgtggaatttcctatcttgcagcatcctgtaaataaacattcaagtccacccttttcttgacttcaaaaaaaaaaaaaaaaaaaaaaaaaaaaaaaa

SEQ ID NO: 548 - DNA, 1399 bp, HOMO SAPIENS
gaaggtggcagagcagcctccccaactaagcctgggtcgccgcctcggtgaagggccgcggggccgagcgcgggaagtggcgtccagtcggtttttggcaggcgagagccagagcgtgagaaccctcccacggcgaggccaagccctgagactggactagcaaggtcgtgagtctctctgtcagctctccgcagcgaaggggcgcggggggcggggaccgtgcccgaccgtgccagctcccgctccggaagcggaagtgcaagcactgcggggtcctgtccagtgtgagcccgacccgagctccagtagttccgcccgctggtcatcgcgccctttcccctgccggtgtcctgctcgccgtccccgccatgctgtctctagactttttggacgatgtgcggcggatgaacaagcggcagctctattatcaagtcctaaattttggaatgattgtctcatcggcactaatgatctggaaggggttaatggtaataactggaagtgaaagtccgattgtagtggtgctcagtggcagcatggaacctgcatttcatagaggagatcttctctttctaacaaatcgagttgaagatcccatacgagtgggagaaattgttgtttttaggatagaaggaagagagattcctatagttcaccgagtcttgaagattcatgaaaagcaaaatgggcatatcaagtttttgaccaaaggagataataatgcggttgatgaccgaggcctctataaacaaggacaacattggctagagaaaaaagatgttgtggggagagccaggggatttgttccttatattggaattgtgacgatcctcatgaatgactatcctaaatttaagtatgcagttctctttttgctgggtttattcgtgctggttcatcgtgagtaagaagcctgccttgctgttcctgggaagatgccatagttttcgttactggatgtttggagtagatactggtctgtgattggtggaatggagaacacacgtgttggtgcttctgggtagcactggtttgcattagtttatgtttccatgccagagtttgtgtgggcgggcgcatgtgcaccacagagtgcactcgaggggactttcagtcacaggatttcataattgtcattgtcacactttcaaatttttgtacatcagtgaatttttttatattaaaaggttgagccaaagcccccagtgtttgtattttgaagccaagcttcacttctaaagtgcctacagagacttgtaaatgaaaatgcagctctgcacgagtttgaaaccgtcatacctccttctattaggaatggcatatactgaggtggtcgtaagtcttaacttctaaaattttaaataaaagactttgcacattgaaaaaaaaaaaaaaaaaa

SEQ ID NO: 549 - DNA, 4209 bp, HOMO SAPIENS
agcaagctgagctcagagcgaagctggcgagccaaggagataaagaaccctcggtggggatgcccagagggtgcatgctccacgcccctcgaaaccgattctcattgctgctgctgcaaagcaacccgaagtgcgccacctacccgactgaggctgcgcaagccccggggtctgggcggggtggtcctcgtgcgcgccgcgtcgccgtggagacgagggcgggcccgcgcgagactggcgtctagaggcgcgcgaagcgctgaggcgggcgtggaccgcgcgggagttaagaagcaggtcccggatcgccgtataccgccgggttttctcccaacgtcaggcccgatggctcggcttccccagttagaaggggaagataaaagactttgattcatgaagaatctgctcactgagaagtgtatatcaagccacaatttccatcaaaaagtgattaagcagagaatggagaagaaggttgattccaggtattttaaggatggtgcagttaagaaaccttattctgcaaagacactgtccaacaagaagtcttctgcatcctttgggatccggagggagttacctagtaccagtcatctagtgcagtatcgtggcacacatacttgtacccgacagggccggttaagagaactgcgcatcagatgcgtggccagaaagttcttatatttatggattcgaatgacttttggaagagtatttccctctaaagccagattttactatgagcagcgattactacggaaggtcttcgaagaatggaaagaggagtggtgggttttccagcacgagtggaaactctgtgttcgagctgactgtcactacaggtattacctgtacaacctgatgttccagacgtggaagacctatgtgcgtcagcagcaggagatgaggaacaagtacattagagccgaggttcatgatgcaaagcaaaagatgcgacaggcctggaagtcctggttgatctacgtggttgttcgtaggaccaaacttcagatgcagactacagctctggagtttaggcaacggattatcttacgggtgtggtggagcacgtggaggcagcgactaggacaggtccgtgtgagccgtgccctccatgcctctgctttgaagcacagggccctgagcctccaggtgcaggcttggtcacagtggcgggaacagctcctgtatgtccagaaggagaaacaaaaggttgtctctgcagtgaaacatcatcagcactggcaaaaacggagatttctaaaggcctggcttgaatacctgcaagtccgcagagtgaagagacagcagaatgagatggctgagcgattccatcatgtcactgtgctccagatatacttctgtgactggcagcaggcctgggagcggagggagagcttgtacgctcaccatgcccaggtggagaaactggccaggaagatggccctgcggcgcgcctttactcactggaaacactacatgctgctgtgtgcagaagaagctgcccagtttgagatggcagaagagcaccacaggcacagccagctgctgctgcacaggttctggaacctctggcggtctcagattgagcagaaaaaggaaagagagctgctccccttactgcatgctgcctgggaccactacagaatagcactgctgtgcaaatgtatcgaattgtggctacagtatactcagaagaggcggtacaagcagctgctacaggccagagcggatggtcatttccagcagagagccctgcctgctgccttccacacatggaacagactctggcgatggcgccaccaggaaaatgtcctcagtgcaagagcaacacgtttccacagggagacattagagaagcaagtattttctctctggaggcagaagatgtttcagcatcgagaaaaccgcctggcagagagaatggccatccttcacgcagagcgacagcttctgtataggtcttggttcatgtggcaccagcaggcagcagcacgtcaccaggagcaggagtggcaaacagtggcctgtgcccaccaccgccacgggcggctcaagaaagctttctgcctctggagggaaagtgcccaagggctcagaacagagaggacgggcagggtgcgggcagcagaattccacatggcccagctcctgcgttgggcctggagccagtggagggagtgcctggccctgcggggagcggagcggcagaagctgatgcgagcagacctgcaccaccagcacagcgtgctgcacagggcgctgcaggcatgggtgacttaccagggcagggtgcgaagcatcctccgggaggtggcagccagggagagccagcacaacaggcagctgctgcgcggggcattacgtcgctggaaagagaacaccatggcccgagtggatgaagccaaaaaaacctttcaagcaagtactcattacagaaggaccatatgttccaaggtcctggtccagtggcgggaagctgtgtcagtgcagatgtattaccgacagcaggaggactgtgccatctgggaggcccagaaggtgctggacaggggctgtctgcggacctggtttcagcgctggtgggactgcagccggaggtcagcccagcagagactgcagctggagagggcagtgcaacaccaccaccggcagctgctgctggaggggctggcccggtggaagacgcaccatctgcagtgtgtcaggaagaggctcctgcacaggcagagcacccaactgctggcacagagactcagccggacctgcttccgccagtggagacaacagctggcagccaggaggcaggagcagcgggcgacagtgcgggccctgtggttctgggccttctcgctgcaggcaaaggtgtgggccacgtggctggcctttgtactggaaaggaggagaaagaaggcgcggctgcagtgggcgctccaggcctaccaggggcagctcctccaggagggtgccacgcggctcctgcgctttgcagccagcatgaaggcctcccggcagcagctgcaggcccagcagcaggtccaggcggctcacagtctccatcgtgccgtccgccgctgtgccacgctctggaaacagaaagtgctgggccggggcgggaagcctcagcccctggcagccatcgcacccagcaggaaagtgacgtttgagggtccccttctcaaccgcattgctgctggggctggggatggcacccttgagaccaagaggccacaggcttctcggcctctgggagctctgggccgcctggctgctgaggagccccacgccctggagctcaacactgcccactcagcgaggaagcagccgcgacgcccacacttcctgttggagcctgcgcagagccagaggcctcagaagccacaggaacatggcctaggcatggctcagccagcagccccctccctgacgcggcccttcctggcagaggccccgacagcactggtcccacacagccccctgcctggggccctgtcaagcgcccctggcccgaagcagcccccgacggcaagcacaggcccggagctgctgctgctgcctctttcctccttcatgccctgcggggcggctgcaccagccagggtgtcagcacagcgggctactcctagggataagcccccggtcccctcatccctggccagtgtccctgacccccatctactccttcctggggacttctcagccaccagggctgggcctggactttcaactgcaggcagcctggaccttgaggctgaacttgaggagatccagcagcaactactgcactaccagaccaccaagcagaacctctggtcctgtcggcggcaagcgagcagcctgcgcaggtggctggagctgaacagagaggagccggggcctgaggaccaggaagtagagcagcaggtgcagaaagagctggaacaggtggaaatgcagatccagctgctggcagaggagctccaggctcagcgccagcccattggcgcctgcgttgcccgcatccaggccctgcggcaggccctgtgctagcgtgttcgcaccaggaacgcaggtgctgggctgtcggggaggcctcaggccacctccaggaacagaacacagttttaagtttgattttttttatttcaaaatgctttgcaattaaatgaattactgttcaaaaaaaaaaaaaaaaaaaaaaaaaaaaaaaaaaaaaaaaaaaaaaaaaaa

SEQ ID NO: 550 - DNA, 3743 bp, HOMO SAPIENS
gcaaaggtgactggcttcagtgaaggtgtggtggatagtgtcaaaggtgggttttccagcttctcccaggccacccattcagcagcaggcgctgtagtctcaaagcccagagagattgcctcactcattcggaacaaatttggcagtgcagacaacatccccaacctgaaggactctttagaggaagggcaagtggatgatgcggggaaggctttgggagtgatttcaaactttcagtctagcccaaaatatggtagtgaagaagattgttctagtgccacttcaggctcagtgggagccaacagcaccacagggggcatcgctgtaggagcatccagctccaaaacaaacaccctggacatgcagagctcaggatttgatgcactactacatgagatccaggagatccgggaaacccaggccagactagaggaatcctttgagactctcaaggaacattatcagagggactattccttaataatgcagaccttacaggaggagcgatatagatgtgaacgattggaagaacagctaaatgacctaacagagctccaccagaatgaaatcttgaacttgaagcaggaactggcaagcatggaagaaaaaatcgcgtatcagtcctatgaacgggcccgggacatccaggaggccctggaggcatgccagacgcgcatctccaagatggagctgcagcagcagcagcagcaggtggtgcagctagaagggctggagaatgccactgcccggaaccttctgggcaaactcatcaacatcctcctggctgtcatggcagtccttttggtctttgtctccactgtagccaactgtgtggtccccctcatgaagactcgcaacaggacgttcagcactttattccttgtggtttttattgcctttctctggaagcactgggacgccctcttcagctatgtggaacggttcttttcatcccctagatgatgctggcacagaaggcattgttccctaccctctggcgagtgcatgcagcagagagttagacagcaacttacctactctgaagttttctacaacaaaaaaagagttgagtgaatctgtttacatttagaataatgtttttttcttcaagagacgcaattgcaatagtattttttagattttatccaagaagttttttgggcgaaaatcttggatcatttttatgtagcatgattttccttgggatgcaaatcttaaaacagtcctttaatatgaaccaacaatctggagcacaccgaagggcaatctaaattgtggcttgaaggactgcactaaaacccactaaaaagatgcgaaaacctgatgagggcaaaccagttaaacctaacaccctgccttgtctgggctcatcacctctccctatcccagactaactttactgtgaaatcctaccacattccatgtctgaatttttggattcggggtggattttcgttgtccgtggaagaacacatggatctctctggctttctcacccaagttggccacttacgctaatcctggaagtatgatcacttttgaacctgccccttaaccttgacgaggatacaaaagtgaaagcatcatcccccaaaggatcactgcacagtcctactacagtatttttaagtagccctctaaatacttaattttaagcaaaatcccttggccgcacttttaaggtttttttatatgtgtatagttaccaacctaaaaataaaaaatccgaacagcatacttgaagaatgtaatactcaaactctcagtgcttccttatggtttctaataggattttttattattgttattattattattgggtttttttggacagggttgggagggtcttttatttttcctttgaaataaagaagtgatgtttttaaatgaagaaatgtgtggatatttaagtgtgctgctccctcttgtcttgaaacagtttgagtaagaaagtcttgctgtaaatgctgccctctgccgcctttgttttgagatgcagtttaaactccctctggctgctgctgctgctttttggtgtcccgacatacctacgcccccgttttatgggtttggcttagttgaagaggaaagggttgtgcaaggagagcaggaggctgtttccaaaaaccagtgtagtaggatagggatttttttttttttttttgccccaagaaaacgttcacccagtgatcttgggctggggttgtctttaggaaaagttgagactataagagtcataaataagtccttgtgtttccttaatttattttgttaacacccctaattacaaccaaagtgatgatgtggagtcttctgtcttcattttggccccagcattcttaatttcaaagctttattctgtctgcctaagagaatcaaccaaaggtgattctcctaaagagcagtgaaggaaatgtcaggttagcaggacccaagttttgggtgtgaaatgttgccagcttcctataatgtaaacggacttgttaacctaacctaattatgctcagtggacttctatagatggttttgaaaaatgaactgagctgccttcccgcatcgcataaccagttccatcatcctggtggaacttgaacatttagagtttatctagagagcttggttaatctttccatattatttgtagtattggtcacaaatgctgttccctcttagcctcattctgtgcaaccaagtgcatataagatgccctgaaaagagtaacaaagtatgctttgcctgtttccacttaccaggaaattccttcagaactagattagcattgccctgcctgtctgaaaggacagtttacctaatggtgccagcctccttttgctttggcaagctggatttctcagagccagcatgttgtttccataactactttgatattttaactcaggtactccagtcttcaccccaacctcagctgattgtagtacacctgctagctctgttgccccctcaaaactgcacccagagcagggccacaagggtgcttttttttctttaaaaaaaaaaaaattagaaccaattcatgttcatgccaaaaacaaattgtccccaagcctatatgtattaaaatgttaactttgcctaaaaatattgcagtgactttttaggcaggagtgccaaaggacactatgaactttttgaactgacagtttctcctaactttctgctttagcgtaattgctcagagtagagagcccccacaaagttatttaaaagatgccctagcagcaatccaccagtttttctaagctagaacctttgagtcccccaaactgcctgaagacttaagttttgtgggcactggaagtcactttgatagatggattgaaactgttcctatttgccctgggacggtttctatctatcaaaggaaggttttcacctgtagaaagccccctgcctccagccaaatagtcccatgctgactttctatcttcctttctcaaactgtcttaggaaggaccttcagtgcagatcaggtgcagtaatggctttcttgtcccttaattattcaccagacccagaagttgtacgcatttaatgctgtttgtaaccatgcatctgttttcattctttgctgtaccttttgctgcccatcctgttacttttgagtttctttcattgtggttgttcttgggttcttttgtcttgtcagagctcttctataacctcgctctaatggcttaacagttgttctgggtggaaacgtcccctcatttgaatgctcctct

SEQ ID NO: 551 - DNA, 7856 bp, HOMO SAPIENS
cgcgatctgctgcagctcggccgggagacggcgcgacccggcggcggggccacccgcgagtccagcgtcgccgcagccccccaatgcggccgcgagaagcagcgggggggcaggcgatcgaaggagccttcacgtaaatgggtccagtcatgcctcccagtaagaagccagaaagctcaggaattagtgtctccagtggactgagtcagtgttacgggggcagcggtttctccaaggcccttcaggaagacgatgacctcgacttttctctgcctgacatccgattagaagagggggccatggaagatgaagagctgaccaacctgaactggctgcacgagagcaagaacttgctgaagagctttggggagtcggtcctcaggagtgtcagccccgtccaggacctggacgatgacacccccccatcccctgcccactctgacatgccctacgatgccaggcagaaccccaactgcaaacccccctactccttcagctgcctcatatttatggccatcgaggactctccaaccaagcgcctgccagtgaaggatatctacaactggatcttggaacattttccgtattttgcaaatgcacctactgggtggaaaaactcagtgagacacaatttatcattgaataagtgttttaagaaagtggacaaagagaggagtcagagtattgggaaagggtcgttgtggtgcatagacccagagtatagacaaaatctaattcaggctttgaaaaagacaccttatcacccacacccacacgtgttcaatacacctcccacctgtcctcaggcatatcaaagcacatcaggtccacccatctggccgggcagtaccttcttcaagagaaatggagcccttctccaagatcctgacattgatgctgccagtgccatgatgcttttgaatactccccctgagatacaagcaggttttcctccaggagtgatccaaaatggagcgcgggtcctgagccgagggctgtttcctggcgtgcggccgctgccaatcactcccattggggtgacagcggccatgaggaatggcatcaccagctgccggatgcggactgagagtgagccatcttgtggctccccagtggtcagcggagaccccaaggaggatcacaactacagcagtgccaagtcctccaacgcccggagcacctcgcccaccagcgactccatctcctcctcctcctcctcagccgacgaccactatgagtttgccaccaaggggagccaggagggcagcgagggcagcgaggggagcttccggagccacgagagccccagcgacacggaagaggacgacaggaagcacagccagaaggagcccaaggattctctgggggacagcgggtacgcatcccagcacaagaagcgccagcacttcgccaaggccaggaaggtccccagcgacacactgcccctcaaaaagagacgcaccgaaaagccccccgagagcgatgatgaggagatgaaagaagcggcagggtccctcctgcacttagcagggatccggtcctgtttgaataacatcaccaatcggacggcaaaggggcagaaagagcaaaaggaaaccacaaaaaattaaaaacaagtcactgatttgttttgaacttacgaccatttggtttcagcatgtcaggagatttctaatgatttgtggcaatatcagcaattttttttcttttttcttgtttttggtttggttttctttcttttcttttccttttattttgttttaatttgccccctcttctttgttttggacccttaagaattttatttttaaaggagattgaagccatagaactcatattgacactcagctgttttacaaaagcttttcattatctgaagacaaaaccgaaaaagccaaaattaccattgcttcctccagcttgtcagaaacctgtggctgaatccgcagggatgtcaacgtcaatatcacaggaacacacattcggcacctagaaggcacgtgggcaaagtaatcatcgttcaggcccaacccttaggtttaaaaagtcaggttgtccatcccattgggttcactgagtgaaggcacataaagcaattgaggaggaggaggaacccctcgtccccctaggagcagacccaagcttgtggcaccaggcatctgatggtgccaggaaagccactggaattgtcacacggcgagcacagagggccggccaccagtcctcgatgcttctgaaccctgaagcccgatgacatcttacgaggtggacgttggactgttcatgcgcatcgggtgtcagtgactcatggagaagaaatggggtaaatttttagtgatgttgctaatcattgaattctgttctctattaaattaagaaaatgttccaaaagccataagcctgaagattggccctgtgcacgcacgcacacacacacacacacacacacacacacacacacacacacgaaggagagagagagaaaactgatggggaaaacaagctgtgtcttcttaactgcccaagtgaaaagcaaccaagtccaggaaattacaatagctgttaaggaaaggaaataatggtacagatctttttctgtctatcaaaactatttgatccaagtgaaaaaaaaaaaaaaactagaaagctacggaacctgccattagtattgtggtgtatttttaagattaaaggtacactgatggacaaaaaaaaaaagtaaaacatggcaaaaaataaaataactcctatactgccctcaaaatggagtttgcaattaatatcaggatttatctttgcaaaaatcagtgatttccacattcagccagtatagccagcagaaatttctgatccacaatgcatggattcctttgaagaaaaaaaagaaaaagagaaaaaaatcacaaaaacaaactttttttattcaaaagtaacaaagttcttgtaaggtaaataatgtatttagcatgaagcatgaattattttcatataaatatagaaaatagagaaaaggctatgcctgtaatttttaagcccttaggcttagagtttcttttggttttcttcttttttctttccttttctttgctttctttttttcctttttgtttttgtttttgttttttgtttttgtttttttttcgggttattttgttttggttttttgaagcaggtgtttaaggtttaaccttcttcagggacaaattctgactgttggggaacttactctgcaatataaaaatatcttcatgctctggtagggcttggatggttgaactctgtactgccttgtgtgcacttcagccccgaccccctctgattctctgttgaaaagtgtgtcctttctctctgtctgtacatgtttaacatgacgcaataatttgagggcaaacttagtagtgagtgtgtatgatagaatcaagagaattatgggacgcttacttgagaaaatcattaccatgatttggttctaggaaaaaggcagtgaataattatgcaaattagccagaagaaggggaaccgtgctaatgggccttattgggtgaggggacgagatggggttcatgtgaaggaggaagcgatgccgaggtaggaaaggccagccccagacatcctatcgccacaatgccatgtcgcaataggaagcaggggccggccatcgctaccttcagcacactgaccaacctggaattaagaccacctagattgcgagagctgaatttagaaaccagacaacgtcatgcagcccagaaactcctgttgttacctttgcctaagaaattttctttaatggcgggggcggggggcgggggtacaaagagaaatctctaaaagaatatgatcttccatccaagtggagggaaactttaaaacaaaaacacccagtactgtggctcaggatatgatgcgtgaggagagggagggaacagagatgaccttaacttttaaaaaagggactgctgtgggccaaagccaagcccatctgccaggacgaggtaatgtcagagctccatcagcccggacagtgggaactaactggtgcattccccacacttaccttccggtgggttgctgatgagagaacctgaaaaaacctacacctctacagcaggtcgaattcatgacctgaagctgaatacttccagcatatttattcagggtgtaggtgggaataaagtatcttcgcagtgctctgttccctccgtctccccagacatctgacaccctaaaagccatccacagctatggaacctgagcgacaccttgatttgtgttgtcacctgaccaagcctaaagacctccagctcagtcccccaccttcatcccaccccacagatgataaaattcagacctctctcctgaaaggcagaggttcaacattcaggactgtttctggccgaggacttcttccaattaaaacccccaccgtgggctgtctcccctcatttcatttttctaaaggggcagaggcctcttttagaaaataataaaatgcaatgtgtgtgatttacttttctgatctctttgagaaatagagaaatataaaagtgtgttcttaactccagaaccactctttttgcataaatacctcatcgggcagctttctaagtgtgattttcctgagtctcccttcgttggatctgccggaagacttgtcggggaacctttagtgagggtacttcttcctatttttcttctgtttttggaggcatacacattatgcataaccaaaacaatggctcaattgtgtttaactttgtattttgattgttgagaacaaaaacaaaaagtatcaatgtgtatgtggctgtttgtagtgaatttattggagaatgaggttgtccgtgtccttaacaagccaaggggcaggaggcaccctctcttatcccctcctccaagagcagtagagaatttaagcacaagcctatttgtgaaagaatattttgcttaagtgtcattcactttagtcttggaattccttcccaaacgtcaggtgttcttttagcttccaaactagcatatgtatccattagtctgacagatcgcctgaacaccattaagaggtgtggcgtttttgctttcatttctcctgctgggagaagtggcggttcatgtgtcattccagtatctcacatactcacacggggcaggggggagggggaaacggggaactatagcaatatttaaagatgctttggaaaccaaccgtgaacacatcaacaccacgacgtctacgattacttgctattggccctcggatacatttaagagaaagagacagtcactcttttttttcttaaatgatatacatataaacagttatttttatcctattataattgtcttttgtctttatctagtactatgtggaaagggtttgcatcatagatttttcccagccttataatataccataagctcctacttccctgcccctccctaatcagtattctttcaagagttctttggtgaagccatctatctgaaactaaaatgaaccaaacccatatttcactggtggttggagaaaaccatggccaaaacgattgtggcaggtctcaatcttgggagtttttaagaaggaatgtgccagaggccgattcccaagaacagagttttcttttgttttgcagaggcattcaatgtgtctagtgcttgctggccacagcagttactaccacagagccttctgggaggggccgttgtgttgaaggaggctcctgcctgagggacagcatcaggcagtgggctctgtagagtgagaaccaggtggaggccttctgtgcccagctcagagttctgcaccacgccaggactgcccaggccaagggctactgacgcaagttccactcattccactctgtggggggcgccttgggcctctcctggaagggctcttggagaaggaattggagttacgtacaagtgacctaaatgggaagcttttctagatgagattggattaaattccatgtgatttctctttccctttaatccaggttgggactcgtttctttctggtggatcacagctgcccagatgttgcaattgatttttatgtttctgtagagaagtatttttctttcatcttcaggattttttttgccaccaaaagaaaacattggaactctgtgtttcctcttgattgtgacttcccagtgttgacagttaagtccttagtgtcgtaggtcccagcccaccaatactatatcaaacactgttatgcacataatgcagcactgtgatctaatttaaataatacttttttattatttatactactatatataatatacatcaacacttttgctatataacctaagtgataaccctcttttagttacctgccaaactctggacttggtttatattgcagttaacacagttacaaagctgtaatggtgtctttttttcctttgtaacggaatgtgtaaatcaaagtatatacattgtgtggtgttcctgtttctggagtttcatgaggatttacacatggcattcagtgttctgtatagatctgcctacctttgtgaattcatctgttaacccctcttcctttgagagagcaccggcgatggtggttaactccttgtgttttctctctctcctactggttattcttgaattaagcacagactcgtcagctcggttgctttatcatgaataatgtgtgtgaccttgcagttcttccacagttcagcaaacaagtgctagcttcactgaccaaaaattaaggaaggaaaacacagtttttaaaacgatccatcttttaacagccgaaaccgatgtgtctatggtgctgcaccttgctgttgtacttctgaaatcagacgtgtgtgaacgatcatttctgacttaaccgtgagatgctcacgagtacccttcctgttgttttgttagcattgaaatcgagactatttatttggaatatatacaacagtgtttttccactgtatttcatttgcaaaagttgagaactgctttctctaccttttgcaaaataattgatattccatattggattctcaaagacttcgatatggtgaacctattaaacctagaaattgtattcatcctttcatgactgtggcctgagttccccagcccctctcctccttttttttagatgagatttagcacactctcagttatttaaacatgcaacatttcttgagtatgtatgttgaggccatctgagctcatagctgattcagtaaccagtttcatgctgtgtcattcacactcactacttaatactgccatggtgaaaatgtggaggaaaaatgtatccatgtgtgtctgggaagcatatacacttgtacattttttaatactctgattctgtaacatttctgagttttgttttgttttacagaaaaaaaaaaaaagtgataaagcaatcagaagaccaagaggtttactattgatgcttagggtcgtctgaccttggctggccaatagacctacacggccaaattaatttacgagagtaataatttttcaaaagccaattttttttctgtattttctgtatgaaactgccaatatcatgaatagaaagggagaaccataaaggagaaagaacgtgatgttctgttatgttcatgtaaacctaaagaaacagtgtggaggcaggcgcgatcagccgaactctagggacttggtgttgcttggaaggcatccatacctgcattttgcattcttcgtatgtaatcatattgccaaagacaaactatttcatcatttattgtaaataacacttttccccagacctaccataaagtttctgtgatgtattgtcttccagttgcaataaaaattactgagttgcatcaattgaagaaaaacaccaaaaa

SEQ ID NO: 552 - DNA, 4225 bp, HOMO SAPIENS
cccctcttcctcgccctctctcgcgggtcggggttacatggcggcgactgcggcaaagcgagagcctcggagacgccgctgccgccagcacagccggagacctgagccgacactgggggcagtccgcgagccccgcactctctcgatgagtcggagaagtcccgttgtatcagagtaagatggacggtagctttgattgtgattgtggtgagctggagccacctgatcactaacaaaagacatcttctgttaaccaacagccgccagggcttcctgttgaaataaatatatagcaacaaaggaaaaaaagaagcaaaacggaaatagtgcttaccagcaccttagaatgatgctgctcaggaccagtccaacactgaatgtatctgcactgtgaggagaatgttcatagaagcctgttgtgtgcatatttattcacatttttgttaaatgttaaatcgtttagcacggtaatctgagtgcacagtatgtcatttcattccgtttgagtttcttgttttcgttaaatgtctgcagagttgctgcccctttcttgaactatgagtactgcaatctttttaattctcaatatgaatagagctttttgagctttaaatctaaggggaactcgacaggcctgtttggcatatgcaatgaacatcaagaaaccatcttgctgtggaagcataattatttttcttctccctttttgaaagatctttccttttgatgccagttttcttccttgtttacacaagttcaatttgaaaggaaaaggcaatagtaagggtttcaaaatggcagagaaatttgaaagtctcatgaacattcatggttttgatctgggttctaggtatatggacttaaaaccattgggttgtggaggcaatggcttggttttttctgctgtagacaatgactgtgacaaaagagtagccatcaagaaaattgtccttactgatccccagagtgtcaaacatgctctacgtgaaatcaaaattattagaagacttgaccatgataacattgtgaaagtgtttgagattcttggtcccagtggaagccaattaacagacgatgtgggctctcttacggaactgaacagtgtttacattgttcaggagtacatggagacagacttggctaatgtgctggagcagggccctttactggaagagcatgccaggcttttcatgtatcagctgctacgggggctcaagtatattcactctgcaaatgtactgcacagagatctcaaaccagctaatcttttcattaatacggaagacttggtgctgaagataggtgactttggtcttgcacggatcatggatcctcattattcccataagggtcatctttctgaaggattggttactaaatggtacagatctccacgtcttttactttctcctaataattatactaaagccattgacatgtgggctgcaggctgcatctttgctgaaatgctgactggtaaaaccctttttgcaggtgcacatgaacttgaacagatgcagctgattttagaatctattcctgttgtacatgaggaagatcgtcaggagcttctcagcgtaattccagtttacattagaaatgacatgactgagccacacaaacctttaactcagctgcttccaggaattagtcgagaagcactggatttcctggaacaaattttgacatttagccccatggatcggttaacagcagaagaagcactctcccatccttacatgagcatatattcttttccaatggatgagccaatttcaagccatccttttcatattgaagatgaagttgatgatattttgcttatggatgaaactcacagtcacatttataactgggaaaggtatcatgattgtcagttttcagagcatgattggcctgtacataacaactttgatattgatgaagttcagcttgatccaagagctctgtccgatgtcactgatgaagaagaagtacaagttgatccccgaaaatatttggatggagatcgggaaaagtatctggaggatcctgcttttgataccaattactctactgagccttgttggcaatactcagatcatcatgaaaacaaatattgtgatctggagtgtagccatacttgtaactacaaaacgaggtcatcatcatatttagataacttagtttggagagagagtgaagttaaccattactatgaacccaagcttattatagatctttccaattggaaagaacaaagcaaagaaaaatctgataagaaaggcaaatcaaaatgtgaaaggaatggattggttaaagcccagatagcgctagaggaagcatcacagcaactggctggaaaagaaagggaaaagaatcagggatttgattttgattcctttattgcaggaactattcagcttagttcccagcatgagcctactgatgttgttgataaattaaatgacttgaatagctcagtgtcccaactagaattgaaaagtttgatatcaaagtcagtaagccaagaaaaacaggaaaaaggaatggcaaatctggctcaattagaagccttgtaccagtcttcttgggacagccagtttgtgagtggtggggaggactgttttttcataaatcagttttgtgaggtaaggaaggatgaacaagttgagaaggaaaacacttacactagttacttggacaagttctttagcaggaaagaagatactgaaatgctagaaactgagccagtagaggatgggaagcttggggagagaggacatgaggaaggatttctgaacaacagtggggagttcctctttaacaagcagctcgagtccataggcatcccacagtttcacagtccagttgggtcaccacttaagtcaatacaggccacattaacaccttctgctatgaaatcttcccctcaaattcctcatcaaacatacagcagcattctgaaacatctgaactaaaacactcagcagacatttatctttgtattcttcatgaaatgtgttttgtctttttttattactagtgtttaagtcattttttacttgaatcagatggtgtcatttagtaaggattttatgagttcttgttttttaaaatccagactttctttttctacatgtgagatagttttcattttaactggcatgtcatttgcacacaaaaataaagactagagcaaaataatgcaacgcaggaggagaaaagaaatgcactaagacaagaacattctctcatagaacattgatctgttttacaggaaacaaaccttgccttgaaatttacacagtgagactgtacataattgcatgaaaatagctatttttttcctaagacatttttcattcatgaatattttcaagtttttcatactgtacacatttcttaaaacacatgataccagcagcaactgaaaatgaatgccgaatttggtacacatgtgttatctacctcaaggtaacaagagtatgtggcaaaacatataccacccatagtgcttcacaaaatgcacttctatttagccagcgtttattgtagtaaactattcttaataaaactcactcactgtttataaatgttctggtatgcattctttatagtgaagtgttaatacatcacatcttatttattttagcaaatcagtatattttctgtatttaattataaaaaattaacttagtttttaaaatttatttgcaaatatactttactttttccatttggcactatggtttgttgcctacctagctgcatctataatgtcagcttatcctaaggctgtccacgtacttaatttacttaagtgttcattttaagtaacgtgctcactgtgtataggaatttgtattttggaggtgcttgatctatctacaaagaaaaattaattaggaattactttattataaaatgctcctagaagtcttaattgtgtttattttttaaaaaaacaaatgttagacttgtgtgcatggaagtaattaaggtacatcattattgtagtttgaaagttgtacatgataagacattttgtttttactgtatgtttttactgaatgatctattccccatcccaaggcaagcatgaataaaattaggttaaacgtagcatgtggcatcgcagtctcttagaatttgtttcatctattttattttattgaatactgtctgtatctttggttatcctgtttgaagaaaaaggacaaataaaacatggccagcaaataca

SEQ ID NO: 553 - DNA, 1079 bp, HOMO SAPIENS
cggggccccccccaggcctggcgggaccaggatgctgccctgtcacctgccccccagccccacacaacgcccccacccacccgaacatccagtctgactggagacagccggatgccctctgaccccgggcccgaggcgggcagtggctggccgggcctcctcatgtcctgcctgaagggtccccatgtcatcctcaagatggaggccatgaagattgtccaccctgaaaagttccctgagctaccggctgccccctgcttcccgcctgctccccggcccaccccaactctggcacccaagcgtgcctggccctcagacacagagatcattgtcaaccaggcctgtgggggggacatgcctgccttggaaggggcaccccataccccgccactgccacggcggccccgtaagggaagctcggagctgggctttccccgcgtggccccagaggatgaggtcattgtgaatcagtacgtgattcggcctggcccctcggcctcggcggcttcttcggcggcggcaggcgagcccctggagtgccccacctgtgggcactcctacaatgtcacccagcggaggccccgcgtgctgtcctgcctgcactctgtgtgtgagcagtgcctgcagattctctacgagtcctgccccaagtacaagttcatctcctgccccacctgccgccgtgagactgtgctcttcaccgactacggcctggccgcgctggctgtcaacacgtccatcctgagccgcctgccgcctgaggcgctgacggccccatccgggggtcagtggggggctgagcccgagggcagctgctaccagaccttccggcagtactgtggggccgcgtgcacctgccacgtgcggaacccactgtccgcctgctccatcatgtagtagcgcctgcctgcccgccactgcccgctgagcctcgctcgctgcttcttcagggacccggccctgccctgccgcccgctgacccttccttccccaccatggcttccggccccaccccgagtggcattgtcgctgcagccaactttgccattaaaactctttgccaaagtttaaaaaaaaaa

SEQ ID NO: 554 - DNA, 3202 bp, HOMO SAPIENS
atgccgaacttctgcgctgcccccaactgcacgcggaagagcacgcagtccgacttggccttcttcaggttcccgcgggaccctgccagatgccagaagtgggtggagaactgtaggagagcagacttagaagataaaacacctgatcagctaaataaacattatcgattatgtgccaaacattttgagacctctatgatctgtagaactagtccttataggacagttcttcgagataatgcaataccaacaatatttgatcttaccagtcatttgaacaacccacatagtagacacagaaaacgaataaaagaactgagtgaagatgaaatcaggacactgaaacagaaaaaaattgatgaaacttctgagcaggaacaaaaacataaagaaaccaacaatagcaatgctcagaaccccagcgaagaagagggtgaagggcaagatgaggacattttacctctaacccttgaagagaaggaaaacaaagaatacctaaaatctctatttgaaatcttgattctgatgggaaagcaaaacatacctctggatggacatgaggctgatgaaatcccagaaggtctctttactccagataactttcaggcactgctggagtgtcggataaattctggtgaagaggttctgagaaagcggtttgagacaacagcagttaacacgttgttttgttcaaaaacacagcagaggcagatgctagagatctgtgagagctgtattcgagaagaaactctcagggaagtgagagactcacacttcttttccattatcactgacgatgtagtggacatagcaggggaagagcacctacctgtgttggtgaggtttgttgatgaatctcataacctaagagaggaatttataggcttcctgccttatgaagccgatgcagaaattttggctgtgaaatttcacactatgataactgagaagtggggattaaatatggagtattgtcgtggccaggcttacattgtctctagtggattttcttccaaaatgaaagttgttgcttctagacttttagagaaatatccccaagctatctacacactctgctcttcctgtgccttaaatatgtggttggcaaaatcagtacctgttatgggagtatctgttgcattaggaacaattgaggaagtttgttcttttttccatcgatcaccacaactgcttttagaacttgacaacgtaatttctgttctttttcagaacagtaaagaaaggggtaaagaactgaaggaaatctgccattctcagtggacaggcaggcatgatgcttttgaaattttagtggaactcctgcaagcacttgttttatgtttagatggtataaatagtgacacaaatattagatggaataactatatagctggccgagcatttgtactctgcagtgcagtgtcagattttgatttcattgttactattgttgttcttaaaaatgtcctatcttttacaagagcctttgggaaaaacctccaggggcaaacctctgatgtcttctttgcggccggtagcttgactgcagtactgcattcactcaacgaagtgatggaaaatattgaagtttatcatgaattttggtttgaggaagccacaaatttggcaaccaaacttgatattcaaatgaaactccctgggaaattccgcagagctcaccagggtaacttggaatctcagctaacctctgagagttactataaagaaaccctaagtgtcccaacagtggagcacattattcaggaacttaaagatatattctcagaacagcacctcaaagctcttaaatgcttatctctggtaccctcagtcatgggacaactcaaattcaatacgtcggaggaacaccatgctgacatgtatagaagtgacttacccaatcctgacacgctgtcagctgagcttcattgttggagaatcaaatggaaacacagggggaaagatatagagcttccgtccaccatctatgaagccctccacctgcctgacatcaagttttttcctaatgtgtatgcattgctgaaggtcctgtgtattcttcctgtgatgaaggttgagaatgagcggtatgaaaatggacgaaagcgtcttaaagcatatttgaggaacactttgacagaccaaaggtcaagtaacttggctttgcttaacataaattttgatataaaacacgacctggatttaatggtggacacatatattaaactctatacaagtaagtcagagcttcctacagataattccgaaactgtggaaaatacctaagagacttttaaaaataggctttcttatatttgatatttggaagaaaaagccgtaaggtgtatgtagaccacttaatcactaaatatctttgcctataggactccattgaatacattagccattgataatctacctgtttaaatggcccctgtttgaactctcaagctttgaagacctacctgttcttccagaagagaacgttgaaagtgccatgtttccttttgcgtgatctctgttgatggcactctggaattgtttcagttaagtcattttagacatagcatttattatcactgtggatctctacttgttgggtgttatgaattctttgaagaaatatattttgaagaggtgtgggaggaaggaatacattttataaaatgttgtagtgaagcccacaattgacctttgactaataggagttttaagtatgttaaaaatctatactggacagttacaagaaattaccggagaaaagcttgtgagctcaccaaacaaggatttcagtgtagattttgtctttcttgaacttaaagaaacaaatgacaaagtttgaatggaaaagcctgctgttgttccacatctcgttgctgtttacattcctttgtggagcctgcatcttcctaagctttttagcaggtatatgttgaacacttctgtttcatggttgagacagaatcagaggccatggatactgacaactgatttgtctgttttttttctctgtctttttccatgactcttatatactgcctcatcttgatttataagcaaaacctggaaaacctacaaaataagtgttgtggtttatctagaaaaatatggaaaatattgctgttatttttggtgaagaaaatcaattttgtatagtttatttcaatctaaataaaatgtgaattttgttaaaaaaaaaaaa

SEQ ID NO: 555 - DNA, 809 bp, HOMO SAPIENS
cccgccccgcgtctgcctcagaggggcccgagccacccggtccgccgcgtccccgccgccgccgccgcgtcccccgccggggccgaccgagccgagccgggccggagcggcgggcgcggccgggccgccatggaccacaagccgctgctgcaggagcggccgcccgcctacaacctggaggccggccagggcgactacgcgtgcggcccgcacggctacggcgccatccccgccgcgcccccgccgccgccctacccctacctcgtcacagggatacccacccaccatcccagggtctacaacatccacagccggaccgtcacccgctatcctgccaactctatcgtggtcgtaggaggctgtcctgtctgcagggttggggtgctggaggactgcttcaccttcctgggcatcttcctggccatcatcctcttcccctttgggttcatttgctgttttgccttgaggaagcgacgatgccccaactgtggagccaccttcgcttaaagggaacaccaggcccggctttcctacacccagctctctttttctaatgtaaatgttgtgtacaataattttatttgattaagcttcaggactgttttgtaaagcgaggtgggaccgatgtggcacacgccagctgcggtttcccggagcgtggagaggcagtgctgctgctcccgcccgaggctcatgacaactcaataaagcactgcttttattttttgcagtcttcaatttgagaaaggtgagaaataatgttttcaataaatgagattcataccattgttaaaaaaaaaaaaaaaaaa

SEQ ID NO: 556 - DNA, 2052 bp, HOMO SAPIENS
gtctgccggtcggttgtctggctgcgcgcgccacccgggcctctccagtgccccgcctggctcggcatccacccccagcccgactcacacgtgggttcccgcacgtccgccggccccccccgctgacgtcagcatagctgttccacttaaggcccctcccgcgcccagctcagagtgctgcagccgctgccgccgattccggatctcattgccacgcgcccccgacgaccgcccgacgtgcattcccgattccttttggttccaagtccaatatggcaactctaaaggatcagctgatttataatcttctaaaggaagaacagaccccccagaataagattacagttgttggggttggtgctgttggcatggcctgtgccatcagtatcttaatgaaggacttggcagatgaacttgctcttgttgatgtcatcgaagacaaattgaagggagagatgatggatctccaacatggcagccttttccttagaacaccaaagattgtctctggcaaagtggatatcttgacctacgtggcttggaagataagtggttttcccaaaaaccgtgttattggaagcggttgcaatctggattcagcccgattccgttacctaatgggggaaaggctgggagttcacccattaagctgtcatgggtgggtccttggggaacatggagattccagtgtgcctgtatggagtggaatgaatgttgctggtgtctctctgaagactctgcacccagatttagggactgataaagataaggaacagtggaaagaggttcacaagcaggtggttgagagtgcttatgaggtgatcaaactcaaaggctacacatcctgggctattggactctctgtagcagatttggcagagagtataatgaagaatcttaggcgggtgcacccagtttccaccatgattaagggtctttacggaataaaggatgatgtcttccttagtgttccttgcattttgggacagaatggaatctcagaccttgtgaaggtgactctgacttctgaggaagaggcccgtttgaagaagagtgcagatacactttgggggatccaaaaggagctgcaattttaaagtcttctgatgtcatatcatttcactgtctaggctacaacaggattctaggtggaggttgtgcatgttgtcctttttatctgatctgtgattaaagcagtaatattttaagatggactgggaaaaacatcaactcctgaagttagaaataagaatggtttgtaaaatccacagctatatcctgatgctggatggtattaatcttgtgtagtcttcaactggttagtgtgaaatagttctgccacctctgacgcaccactgccaatgctgtacgtactgcatttgccccttgagccaggtggatgtttaccgtgtgttatataacttcctggctccttcactgaacatgcctagtccaacattttttcccagtgagtcacatcctgggatccagtgtataaatccaatatcatgtcttgtgcataattcttccaaaggatcttattttgtgaactatatcagtagtgtacattaccatataatgtaaaaagatctacatacaaacaatgcaaccaactatccaagtgttataccaactaaaacccccaataaaccttgaacagtgactactttggttaattcattatattaagatataaagtcataaagctgctagttattatattaatttggaaatattaggctattcttgggcaaccctgcaacgattttttctaacagggatattattgactaatagcagaggatgtaatagtcaactgagttgtattggtaccacttccattgtaagtcccaaagtattatatatttgataataatgctaatcataattggaaagtaacattctatatgtaaatgtaaaatttatttgccaactgaatataggcaatgatagtgtgtcactatagggaacacagatttttgagatcttgtcctctggaagctggtaacaattaaaaacaatcttaaggcagggaaaaaaaaaaaaaaaaaa

SEQ ID NO: 557 - DNA, 2094 bp, HOMO SAPIENS
gatgcctgatctcatcaatctagcgggagagacaggataacctgtccgagagtatagcgccactatgactccgccggaaaaattactttaaaaatcgccaaaaattacttggagcaaagggcagtcggcggacgttcgccaaggctggccagtcggccgttttctcgacccggtgatggccgtcatctcgtgacaagaaacttaaggtcgacagaaaattcaggacccggagtcatgggtccctccggtgggtcgtggcaacagtcccccccgccaccgcccggcacccatctatctatattgtcttttgacgctgaagcgtggaggtgccccaggaaagagtttcccaagccctggctgccctcccccggcgcgctgggtcccggtgaggtctctaggtagggttttgacctgtagcagagaaccaattctggagaacagcctcacttctttgattgaatacttacataatgcattggaacatgacatgagattaaggtttaataatgatagaatgaagaccacaataaaagagacctctacttagctcagcaattcttacctttcttacctatttgatgaagatgtcttttgaaaggtgtactgcaaggaacaaaatgtttgtaaattctccttttaccaagaggtttcttttttaattgatgccaaagagttccaatattgaacatcttaagtctgttacttggattacggattgagtttggagcttactcagaggactacaggagagtatccaggaggtggataattactgtaccttcctcatggaaaaagttttatttaaagtgttatttctcattgaatactatcaaaaaggaaaaaaaaatgacctaaacttttgagatagatttggctctagtaagtatttagttatatcacttgcatatctgggagaagaaataagagactatcatcagtacattcccatctactaaaaaaatttattttacacatgtcaagggattacttataacttccattttattactaatagcttgaacccttttaatgaagacctaactcctccaccagaaatttaagtttatgttcttactttgtttacttataaaatacatctcaggtatttcggatgtcttttttttttctaagcctatatgaaatgaaaaatatattggcaaaataaatgtttaaaccttttacgttaaaattactttgaaagatgaaaagttagtgctgtttttgtctacgttatactgaaattaaatgtttataatttatattttgggtttatgtataaatcatggaatttatgcaaaaatatgagtagtacagattctcctctaattctgtaggactttgaataatgtgatatttttcttataattggacccttgtgttttgaagaaatgccaactgcttgaagaatctccttgttatttgtattatttgctatagggttagatgttgagaaattctgctgacaaaaaattttaagccagttttacactaaatgttcctcagtctgattaatttgttattggatgtattctgtatctttcttttgtaatttgtaacttttatccacttagcacgaatgattctattaaagaaaatcattaggaagtggtagaaactttaaatcgccccagagtttgcctgtttccatattttattaccttataatcttcgggagtgcttacacttatggagctaacattttcagagatacagcttcttatagtaacactaaaactttcttcctctttggactgaatacctataattataactatatggtagtttaagtttccttgtgattagtcaaaaataccattttagtatgaagcaatgaagtctattatttgttgtcccataattgagaaagcttaaatacaccttttattaagagtttgtaaattctagcttagtctacacagatttttatatcaatttgtttatatttttattaatgtcatttctggaagtgtgaaaatgttaatgttcaacaagcaacattaaaaatagatttgaaacatttatatatagagaggtacacatttatttactgtttaggtactgaagattatcacttaataaaaaatatatatccca

SEQ ID NO: 558 - DNA, 1221 bp, HOMO SAPIENS
tttagttggagtctggctctgtcacccaggctggagttgcagtgagccgagatcgcgccactgcactccaacctgggcaacgagcaacaggccatctcaaaaaataaaaatcagtaaataaataaagaaaagactacctcatccagaaatgcctttatagacacacccataaataaatgttcaaccaagtatctgtgcaccccatggtcccttcaagttgacacttgaaattacccatcactccagccttcagccgtgggtttgtttcatatatagatttctagaactccctctttgcatagtgccctcctttcttttttctgccccatttctctgccatttcagccatctcagcctgatctctgcctcctcagcccggtgggatctccctactgtgctcagactccagctctctgcactgcagttgggaaattatccccaggtagaggaactaggtgactttggggctcatctcacaagtttccttacacttagggatcagtcttttgcttcctgttgtcctctgcctgaaagtagttgccaagttgtactgttttatatatccacaacagcatgcgttaaaccaaagtctggatcagcagactgccagatttttttaacagctttattaatcaatacattttgtccatgtctacagttgtttatggtaggaggactaacctatagctggaaagattaattttcagctgctttatagtattttattatatgaattataccagtttgcccatccttgtgttgataaacattacccatgaagtgtgttcgaattgtctgtgatacaaataatgcttcagtgactatctacccagaatgggattgtgggtttataggatacatacttcttcacccttattttttactagatattgccaaattgctttccaaattgtgctgtttcatatatccacaacggcatgagttctgtttgttccacatccataccaagacttgatcttgttaaattaatttttctagtgtgtaaatgagtgcaaaatcctgttactttagtctttactagattactagtgaggttaaatgtatatgtgtatgtatatatatgcacatatgtgtatattattaggtatttgtgtttcccattcaatagcttttttgtatcaattgtcctttttaaaaattgggttatctttttgttattgattctttggagttctttttaaattctacttactaatcccc

SEQ ID NO: 559 - DNA, 2589 bp, HOMO SAPIENS
cggcccgctggagaggaagcccgagagctgccgcgcgcctgccggacgagggcgtagaagccaggcgtcagagcccgggctccggtggggtcccccacccggccctcgggtcccccgccccctgctccctgcccatcccagcccacgcgaccctctcgcgcgcggaggggcgggtcctcgacggctacgggaaggtgccagcccgccccggatgggcatcgtggagccgggttgcggagacatgctgacgggcaccgagccgatgccggggagcgacgagggccgggcgcctggcgccgacccgcagcaccgctacttctacccggagccgggcgcgcaggacgcggacgagcgtcgcgggggcggcagcctggggtctccctacccggggggcgccttggtgcccgccccgccgagccgcttccttggagcctacgcctacccgccgcgaccccaggcggccggcttccccggcgcgggcgagtccttcccgccgcccgcggacgccgagggctaccagccgggcgagggctacgccgccccggacccgcgcgccgggctctacccggggccgcgtgaggactacgcgctacccgcgggactggaggtgtcggggaaactgagggtcgcgctcaacaaccacctgttgtggtccaagtttaatcagcaccagacagagatgatcatcaccaagcagggacggcggatgttcccattcctgtcatttactgtggccgggctggagcccaccagccactacaggatgtttgtggacgtggtcttggtggaccagcaccactggcggtaccagagcggcaagtgggtgcagtgtggaaaggccgagggcagcatgccaggaaaccgcctgtacgtccacccggactcccccaacacaggagcgcactggatgcgccaggaagtttcatttgggaaactaaagctcacaaacaacaagggggcgtccaacaatgtgacccagatgattgtgctccagtccctccataagtaccagccccggctgcatatcgttgaggtgaacgacggagagccagaggcagcctgcaacgcttccaacacgcatatctttactttccaagaaacccagttcattgccgtgactgcctaccagaatgccgagattactcagctgaaaattgataataacccctttgccaaaggattccgggagaactttgagtccatgtacacatctgttgacaccagcatcccctccccgcctggacccaactgtcaattccttgggggagatcactactctcctctcctacccaaccagtatcctgttcccagccgcttctaccccgaccttcctggccaggcgaaggatgtggttccccaggcttactggctgggggccccccgggaccacagctatgaggctgagtttcgagcagtcagcatgaagcctgcattcttgccctctgcccctgggcccaccatgtcctactaccgaggccaggaggtcctggcacctggagctggctggcctgtggcaccccagtaccctcccaagatgggcccggccagctggttccgccctatgcggactctgcccatggaacccggccctggaggctcagagggacggggaccagaggaccagggtccccccttggtgtggactgagattgcccccatccggccggaatccagtgattcaggactgggcgaaggagactctaagaggaggcgcgtgtccccctatccttccagtggtgacagctcctcccctgctggggccccttctccttttgataaggaagctgaaggacagttttataactattttcccaactgagcagatgacatgatgaaaggaacagaaacagtgttattaggttggaggacaccgactaatttgggaaacggatgaaggactgagaaggcccccgctccctctggcccttctctgtttagtagttggttggggaagtggggctcaagaaggattttggggttcaccagatgcttcctggcccacgatgaaacctgagaggggtgtccccttgccccatcctctgccctaactacagtcgtttacctggtgctgcgtcttgcttttggtttccagctggagaaaagaagacaagaaagtcttgggcatgaaggagctttttgcatctagtgggtgggaggggtcaggtgtgggacatgggagcaggagactccactttcttcctttgtacagtaactttcaaccttttcgttggcatgtgtgttaatccctgatccaaaaagaacaaatacacgtatgttataaccatcagcccgccagggtcagggaaaggactcacctgactttggacagctggcctgggctccccctgctcaaacacagtggggatcagagaaaaggggctggaaaggggggaatggcccacatctcaagaagcaagatattgtttgtggtggttgtgtgtgggtgtgtgttttttctttttctttctttttattttttttgaatgggggaggctatttattgtactgagagtggtgtctggatatattccttttgtcttcatcactttctgaaaataaacataaaactgttaaaaaaaaaaaaaaaaa

SEQ ID NO: 560 - DNA, 5511 bp, HOMO SAPIENS
gggacagcaggaggccatggggggatctgaggcagggaaggtgctcaggagaggacctgagaaggaagagatggctgtggtcctggaggctcagggatcaggcctagggcctgtgttccttcggcctcagcatacctctgaagcggtatgcccagcttctctgggcaggccctacaatgtgtgagaaacagcctcagaacaccacctcttttcagggtagttacccaaaatacacacgtgggagtttgccagagttgaggcagcttttaaaggtggagcttttcaaaaagggaaactgggagcacttacagcccaggtctatgttactggtaagaagtggtttgtctcaggaataatgtaccctgtggagagtactttgtgtcagcctcactgagaacaaaaaaagcactcctttccccatgattaacactcgtgtgtcaggaaagtacagtcaatgtatgctaaaaatccacttgaacaattagctcgcttttttccctcatttgctttcagagtaaatgtgctttcagagtattaggtcggcctaatatatgatacattttaagaaggggaggaaagcgcattgtataccctgatgctgggacccaatagaagacaggccccctggctggcctttggttctccctggagctgacaaagggaaggggcttggaaagcagccactgtccccgcctagtttgggcctttacagacacacctttccttttggcagctgctatggcacggattctctatgccagcacgaagctggaaaacctgcctacctggctggtgaaatgagggtggcagctggaggaaacaggcatcttaggagattagaaatgtccttcaaagggacttcagtgagtgctcaggggaccaggggtgactgtgttaagaagggttagaggttgagagggagccatgagcttgggtcatcaccccagtgagaccatccaggcacacagctcccaggcttgggaggccgcctccagtccaccaggaccctcagggagctgtgacttcattgaagctgggtctaaaggcttccttcaaggctcagcaaactgggttttcaaagatttttgatccctgaagctaatttacacgttatgtggggccatggcaaagacttggccctgaagtggacagaaagaggctgtgctgagtgatgaatgagactaaacagtgttctcatgcttggtgattttgatgagaacatactacataagagttaagagcattataattccctttatcaccatataaacatgtcacttatccggaaagcatacaatttatttgtacatgagaatgtaaatttaaaaattttctgaaaactagattaaatcttgagaagcaattttcaagtaaacaaaaacatgccatgttaatcagcactagatctcccccaccccccacataatgtgtatgtacacatttctcaaattcagactgcagtacagctgtctccttggaggcgtcaggggttcctaagcctaaattctacctctagggtcttgatccctcaagagttcatcctgagttaaaattttgttatccccggaagcagagatgcactgactctggtgatctcagtatgaatgtggtatgaaatcttctaggtgtctgtggtggggcctgagggagggtaggaaaggtgacgaggaaaaagtagagggagcctgaacaccctgggtctcaggtacggagtgaagaaatcactaaggtgaaaagacaggctggggcccaggagctcgtccaagtcctgatgaacaacaagtcctgggcaacatcacaggccaccaaacacaccttcagctccagggtcgaatagatggtggaagagcacagccatctggaaaatcagaaaaaagtggggaagattttctatcttgaacttgtgagctggagaattaccattagtagcccactaataggttatggccgatgagtcccttcataacacactgagagccacttttgacactcccagaaaaggcaggttaacaaaaccccttgatggaaggaagaccctcattgcccaatgtacccaagcctctttgaaccttgcttagactgaactgcaaatgtcttgactgctctgggctccttagtgcaactccttcccacagaagccatcaggagcctggtccaggaagctcctctcctacacctgccttaaaaggcccagctctgctggggagtaaggttcatgggggccgtcccaatgcaaaagggaatctctgccatcacccactgcaaccacatggtagccactctgcagccggcaggcgtgaggcatgctgcgctaacatgggagggcggaggctctgcctgacttcccagaagcccagtgagaagtccaggacaatcagcaggtgctatgggaaccttggctggcaggcaccatgtcgtcctgtatgatcggcaggaccggctccttcctgaagacaccgattcttggcggctcctgacaaggattgagaggatttgtgggggacagccctgaagccctgagccctcaactcaatgaagggattgtgctggtgtagacccacagccatccagctctgtcactgatgaaggtctgaactgccatactctgcccctttggtgtcagccttaaaggtcagttttaggtgagtttcaaccagtggctgtagatgggtcctttgtttaccagtttccccacatcctgtctgagaccattgctagtttttgtctgcaccagtcttagggaaaacaacctggacaccgtgggtgagatcaccagtgggctccaagccagagcatgggcctgggacagggtgggttaccttggcatactctaacatactcaaacctcatttcttttggggtgatcagacccaacagcaggtcatgggggcgaggaagtccagtggagtccaaggaatgagaaagacagtttgagagacaaaatgggaccagggggctatcacaagtgtggaggctgcaacaaacaggtggtgaggatgtgggggttgaaaggaaacggtgtatcaagtgaatgagaaacatatggctacttgagaacatgggaatgctagaagcaaggagcagcaagtctagcaaacatgcaagccctgcctcagcttctctcccaacactcagcttttcttccaacacatttcatgtgcaaggttctcgtgcccactcctcttgtacagtttggcagcctcatggagcttccctggtaggaaaacacatctgccagaaacaggtcattgttggtctctccccgcttcttcctctcctggaaaaattagaagcaaaggaaatggcctctgcagccatgggcagaaagcagcctttacaaaggttagatgtggctatttcaagtgaggcccctgggccttcctactggaacctgggcttggctcctggctgttgtctctctcccctaggttcccgctgggaaggcttgataacaaaagcaggcttttaccagacaagcaaagatcaaaaaaagatgtaaacctttgtttgtttaatggaaattcctcagggttgctttcctgtgtattccaaagctatgacagaatgtttagggtttctgcccaagagggagaccaataaaataggatgacaagtcttacgatgtccctacttctaaagagaaggtaagaaatcccgtgctgaacatccactaggttctgggtatatactttatacacacatggcccctttattcctctcagtgaccctcagggtaggtctcactacccaagtgttagagtgaaggacgctgagaccaagaagaggaacaggtcagggtcagacagagctggaatttggacacagttctgtctgactccagatattccttgtatcacacaatactgtcttctgaagcaagtgattgtccccaacacacacacacacacacacacactctctctctctctctctctctctctctctctctctcagcagagctgaggataaagaggaatatcctgcacacttcttccttctgtgtcagggaacatttgcttgtctacagctcgagtatttgtaaacactcagtagcacccaaaccctgagccctagcagtttccttttgcttgtttactagcaagagtagcatgtcggaggacgatgagacattgaatcaaactcttagacaagctggtgaaagttttaacgactgctggaggcaacatgcttccacactgacagaaatcatctttcaaaaatcccgcacatatctcaggcttatgaaacaaactaattcctaatagttggaaatgaattaaaagcttgcggtgagataaaagatagattttggctggatgtgatgactcatgcctgtgatccctacactttaggagggcacagcaggaggatcgcctgagcccaggaattcaagaccagcctggtcaacatagcaagactctctctctgcaaaaaaaagaaaaaaaaaaaaacctcccaaaaaaaaggttttactaggcatgaaaatgagtccatttccattctaggccccaggatatcaccatgaccaataaaaacaatctgtggcactcagcaggtgcatgtcaacatgggcaggttctttctccccgtcagcaggacaagaacatctcccctatccaaaaggcacccactgaggatccgcagttctctggaattatgctgagcacccagatgtgtgcaactaagccctgagcagtcgatgtggagcgcacttgaaggcacttcatttttttttaagatacactcttaggagtttactttaacccacttcccagctcatagcacacgaggagaggcagacattttaaccttggtaagacctgacaaatgacaatagttggaccccacagcaatcattacttttgtagacagcaaagttatgctccttggcttcaggtgaagacccccagatccaggccagtggatttacaagtgagagtcagcagcactgggcatttcaggcaatagctctgaacaagccctttaccatgcgggtaggtaaaccccagaatatacagatgccccttacgatacatgggtggggagggtatgtggccgagagagcataagcttaggagacagagtggatttgaattccactgagcttttggctgtggacccatggggacgtggcatatgtctcgctgagccttagtttcctcctgcatggaatagggagagcaatagtacctgcctcattcagctaacgtgaggatctagagcagcatttgcataaatgacgcgtggggcacagagcagactcaacacagagcagcttacgttatgaggcttggcaggctgggagctcctgtcggcctctctcctcagctctgtgcccactgagctcggcacaagggttggcccatgacaggtgtttattatgtggaaataaatgagagggacaagacatttgctgatttcttcactgtttccaactgggaattcaaatgtatctcacgttcccataccctcacaataaatctgttcaggagaaaaaaaaaaaaaaaaaaa

SEQ ID NO: 561 - DNA, 1049 bp, HOMO SAPIENS
aaaacaacaggaagcagcttacaaactcggtgaacaactgagggaaccaaaccagagacgcgctgaacagagagaatcaggctcaaagcaagtggaagtgggcagagattccaccaggactggtgcaaggcgcagagccagccagatttgagaagaaggcaaaaagatgctggggagcagagctgtaatgctgctgttgctgctgccctggacagctcagggcagagctgtgcctgggggcagcagccctgcctggactcagtgccagcagctttcacagaagctctgcacactggcctggagtgcacatccactagtgggacacatggatctaagagaagagggagatgaagagactacaaatgatgttccccatatccagtgtggagatggctgtgacccccaaggactcagggacaacagtcagttctgcttgcaaaggatccaccagggtctgattttttatgagaagctgctaggatcggatattttcacaggggagccttctctgctccctgatagccctgtgggccagcttcatgcctccctactgggcctcagccaactcctgcagcctgagggtcaccactgggagactcagcagattccaagcctcagtcccagccagccatggcagcgtctccttctccgcttcaaaatccttcgcagcctccaggcctttgtggctgtagccgcccgggtctttgcccatggagcagcaaccctgagtccctaaaggcagcagctcaaggatggcactcagatctccatggcccagcaaggccaagataaatctaccaccccaggcacctgtgagccaacaggttaattagtccattaattttagtgggacctgcatatgttgaaaattaccaatactgactgacatgtgatgctgacctatgataaggttgagtatttattagatgggaagggaaatttggggattatttatcctcctggggacagtttggggaggattatttattgtatttatattgaattatgtacttttttcaataaagtcttatttttgtggctaaaaaaaa

SEQ ID NO: 562 - DNA, 3797 bp, HOMO SAPIENS
gtgtctgagcctgtggagcgattaaaccgtgcgcggagctgcttctttggcggcagcggcggcggcggtggccggtgcggacgcgcggagctcgccggagacgccgggtggccggagccgtggagcggcggcggagcgggcgccgcggggggtgtggcgcggagaatgattacggacctgaagccaaagaacaagatgcgctagtggacagattgctgaccaggggcttgagagctgggttctattttccctcctcaaactgactttgcagccacggagaggcaggggaaatggaaggtgatgcagtcgaagccattgtggaggagtccgaaacttttattaaaggaaaggagagaaagacttaccagagacgccgggaagggggccaggaagaagatgcctgccacttaccccagaaccagacggatgggggtgaggtggtccaggatgtcaacagcagtgtacagatggtgatgatggaacagctggaccccacccttcttcagatgaagactgaagtaatggagggcacagtggctccagaagcagaggctgctgtggacgatacccagattataactttacaggttgtaaatatggaggaacagcccataaacataggagaacttcagcttgttcaagtacctgttcctgtgactgtacctgttgctaccacttcagtagaagaacttcagggggcttatgaaaatgaagtgtctaaagagggccttgcggaaagtgaacccatgatatgccacaccctacctttgcctgaagggtttcaggtggttaaagtgggggccaatggagaggtggagacactagaacaaggggaacttccaccccaggaagatcctagttggcaaaaagacccagactatcagccaccagccaaaaaaacaaagaaaaccaaaaagagcaaactgcgttatacagaggagggcaaagatgtagatgtgtctgtctacgattttgaggaagaacagcaggagggtctgctatcagaggttaatgcagagaaagtggttggtaatatgaagcctccaaagccaacaaaaattaaaaagaaaggtgtaaagaagacattccagtgtgagctttgcagttacacgtgtccacggcgttcaaatttggatcgtcacatgaaaagccacactgatgagagaccacacaagtgccatctctgtggcagggcattcagaacagtcaccctcctgaggaatcaccttaacacacacacaggtactcgtcctcacaagtgcccagactgcgacatggcctttgtgaccagtggagaattggttcggcatcgtcgttacaaacacacccacgagaagccattcaagtgttccatgtgcgattacgccagtgtagaagtcagcaaattaaaacgtcacattcgctctcatactggagagcgtccgtttcagtgcagtttgtgcagttatgccagcagggacacatacaagctgaaaaggcacatgagaacccattcaggggaaaagccttatgaatgttatatttgtcatgctcggtttacccaaagtggtaccatgaagatgcacattttacagaagcacacagaaaatgtggccaaatttcactgtccccactgtgacacagtcatagcccgaaaaagtgatttgggtgtccacttgcgaaagcagcattcctatattgagcaaggcaagaaatgccgttactgtgatgctgtgtttcatgagcgctatgccctcatccagcatcagaagtcacacaagaatgagaagcgctttaagtgtgaccagtgtgattacgcttgtagacaggagaggcacatgatcatgcacaagcgcacccacaccggggagaagccttacgcctgcagccactgcgataagaccttccgccagaagcagcttctcgacatgcacttcaagcgctatcacgaccccaacttcgtccctgcggcttttgtctgttctaagtgtgggaaaacatttacacgtcggaataccatggcaagacatgctgataattgtgctggcccagatggcgtagagggggaaaatggaggagaaacgaagaagagtaaacgtggaagaaaaagaaagatgcgctctaagaaagaagattcctctgacagtgaaaatgctgaaccagatctggacgacaatgaggatgaggaggagcctgccgtagaaattgaacctgagccagagcctcagcctgtgaccccagccccaccacccgccaagaagcggagaggacgaccccctggcagaaccaaccagcccaaacagaaccagccaacagctatcattcaggttgaagaccagaatacaggtgcaattgagaacattatagttgaagtaaaaaaagagccagatgctgagcccgcagagggagaggaagaggaggcccagccagctgccacagatgcccccaacggagacctcacgcccgagatgatcctcagcatgatggaccggtgatggcggagccttgtgcgtcgccaggacttctctgggctgtgtttaaacggcccgcatcttaatttttctcccttctttctttttttggctttgggaaaagcatcattttaccaaacataccgagaacgaaaacttcaaggatgatgttagaaaaaaatgtgatttaactagaacttgctgtctgatgttagcaaatcatggaatgttctgagtccctgagggtttactgtgaagtgctgaggacagtgttgacaactaactcgttttcctagatggaaacggagacattgacccctccctccatgtggtaaaccactccagaatggccaccaggcttcccagagttctatggtcttcttcccaagagagtttttaattgtaaatgcatacttgggaaggacttagagttttaaactgttttttgcttttgcttttccctgactccctttgcttggagtcagctgcacaccagtagtatggcatgctacgatcaggttctgtcctgaaagctttgcctctttcttggcaaagtttctggtatggtcaagcttgtaaataactttttttacattttaatcttttccattaattaagaggttgaaaagaagtgcagtgtaagaaaacccagcattttaattacttgcaaattaagttaccacagactctgtagtgtgtaaatgttgacaaggaattggatcacaatcatgtagcagaatggcacccagaccactgcccaccagtgacggacatgcacgtggcagatcatgatttccagcccacggagccagcatttgaaccttgtataattaactttcagttatgatttcccatcgacattttctttgccctgtttgtagctgattgttgtgttttataaatcttctgttaaggcagaagggtgattatgagtggttcacagcagcccttataagctgggccagaaaatttcactaggtcagtaatttaaaccttggatcttcaaaaaataaaataatgtgaagcaaaaccaactaaaaagtgattcttgcacatgaactgtcacatgtttaaaaatgtgttttttagagagcctcagtcttactgatttcaaacacttttttcttctgtgtattgcttttaagagagccatcagttagctatcagactctaggttgatgcattttgtacttagctgtactgtgtgatatttttcattattttaggacgccaacatgagacctgtaataaaatatgtaatggggttgaaagctggggaggaggatctactgctgtacagctaataaatcataacggattaacaagtgctccaaagaaaaaaaaaaa

SEQ ID NO: 563 - DNA, 1344 bp, HOMO SAPIENS
gaaagagaacctgtaaacgctctcggaattatggcggcggtggatatccgagacaatctgctgggaatttcttgggttgacagctcttggatccctattttgaacagtggtagtgtcctggattacttttcagaaagaagtaatcctttttatgacagaacatgtaataatgaagtggtcaaaatgcagaggctaacattagaacacttgaatcagatggttggaatcgagtacatccttttgcatgctcaagagcccattcttttcatcattcggaagcaacagcggcagtcccctgcccaagttatcccactagctgattactatatcattgctggagtgatctatcaggcaccagacttgggatcagttataaactctagagtgcttactgcagtgcatggtattcagtcagcttttgatgaagctatgtcatactgtcgatatcatccttccaaagggtattggtggcacttcaaagatcatgaagagcaagataaagtcagacctaaagccaaaaggaaagaagaaccaagctctatttttcagagacaacgtgtggatgctttacttttagacctcagacaaaaatttccacccaaatttgtgcagctaaagcctggagaaaagcctgttccagtggatcaaacaaagaaagaggcagaacctataccagaaactgtaaaacctgaggagaaggagaccacaaagaatgtacaacagacagtgagtgctaaaggcccccctgaaaaacggatgagacttcagtgagtactggacaaaagagaagcctggaagactcctcatgctagttatcatacctcagtactgtggctcttgagctttgaagtactttattgtaaccttcttatttgtatggaatgcgcttattttttgaaaggatattaggccggatgtggtggctcacgcctgtaatcccagcactttgggaggccatggcgggtggatcacttgaggtcagaagttcaagaccagcctgaccaatatggtgaaaccccgtctctactaaaaatacaaaaattagccgggcgtggtggcgggcgcccatagtcccagctactcgggaggctgagacaggagacttgcttgaacccgggaggtggaggttgccctgagctgattatcatgctgttgcactccagcttgggcgacagagcgagactttgtctcaaaaaagaagaaaagatattattcccatcatgatttcttgtgaatatttgttatatgtcttctgtaacctttcctctcccggacttgagcaacctacacactcacatgtttactggtagatatgtttaaaagcaaaataaaggtatttgtata

SEQ ID NO: 564 - DNA, 4290 bp, HOMO SAPIENS
gtgcgggacgcgctgcagctggagaggaaaggcagagcgaggaggggcgaggccaagaaagcgcgcgtttctgggaggggaggagcctggctaaggagcgccgcgtcacatccggtagagttagagcccgtgcggaggcggtgcggagcatttcggctctgagcggctgggcgaccggcgcgtcgtgcggggctgcggcggagcctccttaaggaaggtgcaagaggttggcagcttcgattgaagcacatcgaccggcgacagcagccaggagtcatgagcgacagcggcgagcagaactacggcgagcgggaatcccgttctgcttccagaagtggaagtgctcacggatcggggaaatctgcaaggcatacccctgcaaggtctcgctccaaggaagattccaggcgttccagatcaaagtccaggtcccgatctgaatctaggtctagatccagaagaagctcccgaaggcattatacccggtcacggtctcgctcccgctcccatagacgatcacgtagcaggtcttacagtcgagattatcgtagacggcacagccacagccattctcccatgtctactcgcaggcgtcatgttgggaatcgggcaaatcctgatcctaactgttgtcttggagtatttgggctgagcttgtacaccacagaaagagatctaagagaagtgttctctaaatatggtcccattgccgatgtgtctattgtatatgaccagcagtctaggcgttcaagaggatttgcctttgtatattttgaaaatgtagatgatgccaaggaagctaaagaacgtgccaatggaatggagcttgatgggcgtaggatcagagttgatttctctataacaaaaagaccacatacgccaacaccaggaatttacatggggagacctacctatggcagctctcgccgtcgggattactatgacagaggatatgatcggggctatgatgatcgggactactatagcagatcatacagaggaggaggtggaggaggaggaggatggagagctgcccaagacagggatcagatttatagaaggcggtcaccttctccttactatagtcgtggaggatacagatcacgttccagatctcgatcatactcacctcgtcgctattaaagcatgaagactttctgaaacctgccctagagctgggatattgtttgtgggcaatattttttattgtctcttgtttaaaaagtgaacagtgcctagtgaagttaggtgacttttacaccttttacgatgactacttttggtggagttgaaatgctgttttcattctgcatttgtgtagtttggtgctttgttccaagttaagtgttttcagaaaagtatgttttgcatgtatttttttacagtctaaattttgactgctgagaagtttctattgtacaaaacttcatttaaaaggtttttctactgaatccagggtattctgaagatcgaagcctgtgtaaaatgctaccaaatggcaaaaagcaacaataaacagtttgatttttacttttctttctaacatatcaatgcttagcagaactattcagattgtcagtagtaaatttaaagacaaatgcccgttttcctccagtccatgaaacataccatacttatatacctgcaactaagtgtttaaaattatgctctgtaactctgtactgctagtattagaactaaaaatcttaaaatacagccagtgcttaatgcttatatcaatgtggatttgtcggcttttatgtaatctgtaatatgtatagcaggaaatacgaagagttacacagtgtatgccttaaaaggctgtttcttaaaggtgttacaaggggataatggtatttcaactagttatcagcaagtgacaatacattccaccacaaatacactcttgttcttctagcttttagactatatgaaaaaaccgggtgcttcaaagtacatgataagggaacactatacctgtcatggatgaactgaagactttgcctgttcattttttaaatattattttcaggtcctttgcttaccaaaggaggcccaatttcactcaaatgttttgagaactgtgtttaaataaacgcaaatgaaaagaaaaatgttggtgcagctgttcacaaagaagtgttcttgttctattataattagagttcttctgtagtttaatcgttagggcagtgtgttccttgggctgaggtgtatctttgctattttgggctgggttgagggggggatgaatttctgtattcctggaaaattcagagtgcataactaggtattagagtgatctccatttggggatggagttacagtaaataactagactgcgggtactttaatacatgttcttattattttgcatttaagtaattttcatgaccaattgtagggatgttgctacaggtgggttattttgttgccttgctaacctttatcgcatctaggtattagtatgtttcaggtactttgggaagaactttacatataatctttagcaatgaaatgatgtagagtaacttaccttagttcaaatagctgtttaagtggcaatgccacgatctgaattgaacctaggtgatcttagtccacagttctcttgatcatgatgtctcaaatctgggtacctgggtgatggaaaataccagtaatggagcataggcagtattggcaggtcttaatttgtaaaacttactgtccagggtgttttcagtgtttgccaacttgtggtaaattaatatgcttagagaactacccttaggtttgtttctgataagcatgtggaaacaacttagtatatgcctgatgggttatttcaaattgttctcaatgagttttgaaacaagaatttgtagtatttatatataaagttgagttttagggtgtggtcccagagggggttgtgttatggatggatacattaaaggctgagaaacctggttttatcgtggtagtatatacaggcatcctttcctgaagtaactacattctccaccattttctccccaaccaaacctctccccatcagttaactgatggcttgcgagttcacactcctgataatctcgaacataaccctcggtttctatcctaaagcctgagttttagccctttagttgtgtagccatcctttatcctgctgattgaaagtttccttttttaggctagtttgagttgttttctggcttttagatttgaaagaattttagccatttgacatggctacaaagagtgttaacaggcaaaagactgaggaaaatttggaattttaccaagttgagatagactgagaagtagtgagacaaagtggtagtcttttgatgtgctgtaatgctagtcgccagtttcatgaaagggaggcagcagttacccgtaggtaacccctaggtaactgctgccatgggcagctgaatcagacaaaagccatgggaaaggataaatttgagtcttaaagttactgcctcaaggcaaagggacttggaggcttttatatgccaatacaaacaatccatttcttatagctgtagggctgagactactaaaaccaaatgtaaagttcatttggaagattgctaagttaaatagttttatactaggcttttgtgaaacttctcaggaaatcaacagggtcccagcaagtggaaataaggctgtgtcaaaagatttgtagacctgggagcaggggtttccgatctcctggccatggattgcctgagctccgccgcctgtcagatcagcaacagcagattttcatagcaggaatcctattgtgaagtgcgcttgagagggatctagcttgcacatttccttatggaaatctaactacatgttagagaatgctcaaggtctgcaatgtttacattgttgcccctacataaggaatatatgccttaagataaaactaatagctcttagccctcttacaccattgactaggattccaattctgcaaggcccaggaggagaaattgagaattagaagtttcaccgagaagaaataaaaagatttggtttgcattatcaaaatttctgtaaattatatggaaattttgaggatggattaggctggatttattagcagtggacacgcctccaatattccttcagcatgccatctcagtggattttgattggctcttgtaggattggacttaatgctagcttatgccaaatgtcatcaaaaagccagaatgctactacagtaatgtaaaggattattgtatatagtgtaaaggattattatgtgtaatctttaatatataatgtaaagacttaaaa

SEQ ID NO: 565 - DNA, 4796 bp, HOMO SAPIENS; identical to SEQ ID NO: 146

SEQ ID NO: 566 - DNA, 3655 bp, HOMO SAPIENS; identical to SEQ ID NO: 160

SEQ ID NO: 567 - DNA, 1003 bp, HOMO SAPIENS
agttacctctcccctttcacgtagttttcatttgtggtgagattctctcccaggccacaagacatttcctgctcggaaccttgtttactaatttccactgcttttaaggccctgcactgaaaatgcaagctcaggcgccggtggtcgttgtgacccaacctggagtcggtcccggtccggccccccagaactccaactggcagacaggcatgtgtgactgtttcagcgactgcggagtctgtctctgtggcacattttgtttcccgtgccttgggtgtcaagttgcagctgatatgaatgaatgctgtctgtgtggaacaagcgtcgcaatgaggactctctacaggacccgatatggcatccctggatctatttgtgatgactatatggcaactctttgctgtcctcattgtactctttgccaaatcaagagagatatcaacagaaggagagccatgcgtactttctaaaaactgatggtgagtcaatgcaaacatgcctctcagaacatgtgggtttttagaaatatcactaaagactttgtcaattatttgttgttttgaataattcagcaataactatttcttaagtctcctgaagtgctatcataatatcaagattggctttaattttcttcttatgaagaagatagctctatactttgaaaccatattttagtaaataaaggaatggtgaattttctaaacttctcagaattctggtgatctattaaggaagcacttaccacttgtaaaataccagagtatggtgagatacaaaagaattagaaaacatgttccctgctaagacaaacaagttgacaaaaggaattcgtaaataattataaaatagaagagtaaagaaaataacattctgtatgatatttggattgattgtggcataaagcatctatcatagcaaggtgaggttaaatagaaaactcctgttggagaagctgaactttgaaagaggtgaacatagaatttagaatgtttggaaatgt

SEQ ID NO: 568 - DNA, 1003 bp, HOMO SAPIENS; identical to SEQ ID NO: 567

SEQ ID NO: 569 - DNA, 793 bp, HOMO SAPIENS
taggctacctccgcgctccacccagagacgggtcgcgctgctcccgccgccgcaaccccgggccctcgtgccggcggtctcccctcttccacgggcgagattactgcatagcagaggatgaccgagtgggagacagcagcaccagcggtggcagagaccccagacatcaagctctttgggaagtggagcaccgatgatgtgcagatcaatgacatttccctgcaggattacattgcagtgaaggagaagtatgccaagtacctgcctcacagtgcagggcggtatgccgccaaacgcttccgcaaagctcagtgtcccattgtggagcgcctcactaactccatgatgatgcacggccgcaacaacggcaagaagctcatgactgtgcgcatcgtcaagcatgccttcgagatcatacacctgctcacaggcgagaaccctctgcaggtcctggtgaacgccatcatcaacagtggtccccgggaggactccacacgcattgggcgcgccgggactgtgagacgacaggctgtggatgtgtcccccctgcgccgtgtgaaccaggccatctggctgctgtgcacaggcgctcgtgaggctgccttccggaacattaagaccattgctgagtgcctggcagatgagctcatcaatgctgccaagggctcctcgaactcctatgccattaagaagaaggacgagctggagcgtgtggccaagtccaaccgctgattttcccagctgctgcccaataaacctgtctgccctttggggcagtcccagccacctgtgc

SEQ ID NO: 570 - DNA, 2009 bp, HOMO SAPIENS
cgggtctcgaggctgctgaaaccgaaaccgctgtgctgtgggcgcagcgccgagattgattcaccttcacctgtgctgcactccagctgacccaagtaggaagccagacgagctgtaaaacatgaacggaagagtggattatttggtcactgaggaagagatcaatcttaccagagggccctcagggctgggcttcaacatcgtcggtgggacagatcagcagtatgtctccaacgacagtggcatctacgtcagccgcatcaaagaaaatggggctgcggccctggatgggcggctccaggagggtgataagatcctttcggtaaatggccaagacctaaagaacctgctgcaccaggatgctgtagacctctttcgtaatgcaggctatgctgtgtctctgagagtgcagcacaggttacaggtgcagaatggacctataggacatcgaggtgaaggggacccaagtggtattcccatatttatggtgctggtgccagtgtttgccctcaccatggtagcagcctgggctttcatgagataccggcaacaactttgaaaaacttgctctctttcaatactcccaatgaagatacatttcactcaccctccacccctgctattctgccatgtctttccctctctctgcatagccagatttgaagtgactgatacccaccccaaaccttgctgttcacagtctccaattcttcatattctaatgggaaagtaaaggtattgtttgaaggaaaactgaagaaaagacttggcttagaacaaatgaggagttatatattttactaggacttttgatagaaattcagctacaacccaaagagagaaagattgagtcttcctgtcaccataggcaataccttttttcttagctggcatgccataaaggccagctatgtgatattagaggaagaaaggatttttctttttaatgatcttccttgggaaattattgtggcctttatttaatttctaactacgtacctgggtgcctatatcgacaaagagtgagaagagcatttttacttttttaaaaaagcaaatacatatatacacatacgtatgcaaatattatagtataatagtgatccctatggagaattaaaggtgagaaagctactttgtggtgtctaggtttctgataaaagggatgatcttaactgaagaatttaaagagatacttaaacagagcaaatgtagtaggaacaagggagtgagccttataagaggacgttcagtctcatttattaaaataataactgagactgggagaggtggctcatgcctgtaaatcccagcactttggtagcctgaagtgggagattgcttgagtccaggagaccagcctgggcaacatagcaaaacctcatctctatttaaaaaaaaaatagaaaaaaatgtaataactgaagcaactaattaaaaatcttagaagaacaatatttattcttataacagccaactatggtgagttattataaggtaaattgccataatccagcgctgctcacatctaaaaaactttgaggtgtaaaggtaaatcgtaccaatctctgggctgccctagtgacttttttgatacctcagagtcctattgaagaaccaggtggaatgattgtggtaagggctatagtgctggagccaaacaccccagcaagaaaactctaaaaggacaaaagataaggtagtgcctccaaggtggcacctgaaccctctcaggctactttttggtttctactaacaaacctgagggaaggaactgcctccctggcaggatgggcatcaaatcaactctggcttcagatttagttaaaatgaggccgggtgcagcggctcacacctgtcatctcagcactttgggaggccgaggcaggcagatcacaaggtcaggagttcaagaccagcctggccaacatggtgaaaccccatgtctactgaaaatacaaaaattacctggacatggtggcgcgttcctgtaattccagctactcagg

SEQ ID NO: 571 - DNA, 3244 bp, HOMO SAPIENS
ggccgccgggcgcagtcagccgccgccacctccgccgcgctctgtccggacggacgctcgccgcccgcagcctgccgcccgccgcagggcgctgacggtcccgcacgtctgccgctgccaccggcgcgcccgattcatccatgagctcggatttcccacattacaacttcaggatgcctaatattggattccagaatctgcctctcaacatatatattgtggtttttggtactgctatatttgtcttcatccttagtttactcttctgttgctacttgattaggctaagacatcaagcacacaaagaattttatgcctacaaacaggttatattaaaagagaaagtaaaagaattgaatttacatgagctctgtgcagtgtgcctagaagacttcaagcctcgagatgagttggggatttgcccatgtaagcacgccttccacagaaagtgccttattaagtggctggaggttcgtaaagtgtgtcccctgtgcaacatgccagttctacagctggcccagttgcacagtaagcaggaccgtggaccccctcaggggccccttcctggggcagagaacattgtatagcttaccgcaaggatcagactgttgctggacacgacgtctgtgtggagccaggaggaacacatgtggtgtctgtatggctgctctctacctaggacaccagctgccacttcttttgcctcatgaagaactcttgggccagccaaactgggaacctaggtgtctgggtcttgtgacaaccaaagcactttgacactaccccctgccgagagaagaggagtggatgagcctgcgggtttgcctcaagaaacttcatgagggtctcttactaactccattacactctctctcctggagcctcatctccatgtcaagcaggagggtaaagaagggaactaagagcaggtctttcaagccacacccccacctgcggatggatgggtttctctgtaggccatgcaggcctttgtcgcagcaaaccttcccagcagcccttgagccaagtaaaaccagcacaaccagccaccagtggttggtgaggcagtgcccacaaggctcatgttgtatgcctttgataaggccatcttggctttgagtagcagtgttcctcgtcacccatttccccctcaggattacaacacctgctatcaaatcatctaagctgaaaacatgagatgcgcttggaaaggcctagtcagaagccatttcctcttatcatttccctctcctatgcaccagtaaggcccgtccagagccccagcagggagtgggccctgagtccacactgtccctgagtgatccaggaggctgcccacatccccacatgtgcactgtggttccagtgtagctgctgtgagcccactgccactgcctcagaagggagccactgtgaacctctcgagtggctccaaagagcagtggctttttgagaatggcccatacttctggcccggctggatgaagggaatgccgaccctttggcctctccccctccttccatctcttctctctcttgccctatctctctttctacttcagaaaaaaaaaaaaaaaaaaaaaaaagcctgtcattcactttttaacactttatcccaaataagatccctgtgtaattctgaagctggtgatccacttggaattgtagatagtttcaggaagctcctgcagggctgtccaccgttggtgtgtgcctcagtatttggacttccgaaactgaaagtgaaagtgtctttataggagagaaacgcatgctgctctttggctctttctgtccaacttttctagaaatgactcaaagtccattaagatttgtgaatattgtataaattagctatggaaagtagcaggtcagatggaaaattcttttccacagccctgctctccgcctccctccatcttaggagcgcctgcctcaattcctcgtcaactgctttgctccactccatcccacaggtgtgagtgggggaagtttttcattaggaatacagtctgcgtgacatggagaatggatggagggagctttgctactctgctcttggcatgactccaggatttttttctggaatccaacctctgtcctcttaggagaaggaacctgtccttggttcagatggctgggcatgaggaggaaaatttccattagtgtagaacagtgctggacagaatccggtttggaaaattacaaatccagttggtcaaaataggccatttcctatgtgtgacctattcgtggtatgccaactggactgcttcctaaacaggacgaggaaagtgaggaatatttttatatgaaagccttagcctgtctggcacccatgaaaaaaactatttatgcactcctactttcaccgtctttttgcattctctatttgtagcacaacagagttgaatgccacaaaacaccccgtttatagtgagctgttttcagtgaccaatatcagaaggaggcttgcttctggactagcctcactaattgccagcagccaccattttccatggaatggccttgggacagatgtcacctctgttatggggctctaataggaaagagaatgttttttcccttcctatgatcaatactgcaaattattgctgctcacagcttttataggattctcccaactgaaagttgcaggctttttctgtccctgtgcatcagtactaacaaaagacagcctcaccaagtctgtatatttgaacagaggcaagttaattcatccccccgtgtcagagccacaggcatgttgagggggttgatacgtagcactggaccagggcgcaaagcccagatagttccagccatgagaggagagcacaagaatgctctgcactctgcactcagcaccaccttgggtctgctttgcccagatgagggaccactaacaaccttctcagcacatgtgaatgtggactggttttaaaatgcattcattctgctaggattgggctggaagctggaacagtgagagtactttttctgctcctagtcatctccctttctcagcgtgacatcctcctgcagcaagcctagtatcactagcagtagttcctgcgactcttagcaacacaacccgaatatttgctccctgcatctgggtcctccaccaggatgggcctgcgcatctgcattgctgtacagacaaacaggccttttaatttacatcctcctttaattctcattaaaatcgcagggtttttgtttgaaaaaaaaaaaaaaaaaa

SEQ ID NO: 572 - DNA, 972 bp, HOMO SAPIENS
gattgcttatagaccggaagccgggaccttaattctctttcccatcttgcaagatggcgggtgaaaaagttgagaagccagatactaaagagaagaaacccgaagccaagaaggttgatgctggtggcaaggtgaaaaagggtaacctcaaagctaaaaagcccaagaaggggaagccccattgcagccgcaaccctgtccttgtcagaggaattggcaggtattcccgatctgccatgtattccagaaaggccatgtacaagaggaagtactcagccgctaaatccaaggttgaaaagaaaaagaaggagaaggttctcgcaactgttacaaaaccagttggtggtgacaagaacggcggtacccgggtggttaaacttcgcaaaatgcctagatattatcctactgaagatgtgcctcgaaagctgttgagccacggcaaaaaacccttcagtcagcacgtgagaaaactgcgagccagcattacccccgggaccattctgatcatcctcactggacgccacaggggcaagagggtggttttcctgaagcagctggctagtggcttattacttgtgactggacctctggtcctcaatcgagttcctctacgaagaacacaccagaaatttgtcattgccacttcaaccaaaatcgatatcagcaatgtaaaaatcccaaaacatcttactgatgcttacttcaagaagaagaagctgcggaagcccagacaccaggaaggtgagatcttcgacacagaaaaagagaaatatgagattacggagcagcgcaagattgatcagaaagctgtggactcacaaattttaccaaaaatcaaagctattcctcagctccagggctacctgcgatctgtgtttgctctgacgaatggaatttatcctcacaaattggtgttctaaatgtcttaagaacctaattaaatagctgactacaaaaaaaaaaaaaaaaaaa

SEQ ID NO: 573 - DNA, 1898 bp, HOMO SAPIENS
cagcggccgggaaggggcggtgcgggaggcggggtgtggggcggtagtgtgggccctgttcctgcccgcgcggtgttccgcattctgcaagcctccggagcgcacgtcggcagtcggctccctcgttgaccgaatcaccgacctctctccccagctgtatttccaaaatgtcgctttctaacaagctgacgctggacaagctggacgttaaagggaagcgggtcgttatgagagtcgacttcaatgttcctatgaagaacaaccagataacaaacaaccagaggattaaggctgctgtcccaagcatcaaattctgcttggacaatggagccaagtcggtagtccttatgagccacctaggccggcctgatggtgtgcccatgcctgacaagtactccttagagccagttgctgtagaactcaaatctctgctgggcaaggatgttctgttcttgaaggactgtgtaggcccagaagtggagaaagcctgtgccaacccagctgctgggtctgtcatcctgctggagaacctccgctttcatgtggaggaagaagggaagggaaaagatgcttctgggaacaaggttaaagccgagccagccaaaatagaagctttccgagcttcactttccaagctaggggatgtctatgtcaatgatgcttttggcactgctcacagagcccacagctccatggtaggagtcaatctgccacagaaggctggtgggtttttgatgaagaaggagctgaactactttgcaaaggccttggagagcccagagcgacccttcctggccatcctgggcggagctaaagttgcagacaagatccagctcatcaataatatgctggacaaagtcaatgagatgattattggtggtggaatggcttttaccttccttaaggtgctcaacaacatggagtatagatgctgacctccatcattttggctcccctgtgtagattggcacttctctgtttgatgaagagggagccaagattgtcaaagacctaatgtccaaagctgagaagaatggtgtgaagattaccttgcctgttgactttgtcactgctgacaagtttgatgagaatgccaagactggccaagccactgtggcttctggcatacctgctggctggatgggcttggactgtggtcctgaaagcagcaagaagtatgctgaggctgtcactcgggctaagcagattgtgtggaatggtcctgtgggggtatttgaatgggaagcttttgcccggggaaccaaagctctcatggatgaggtggtgaaagccacttctaggggctgcatcaccatcataggtggtggagacactgccacttgctgtgccaaatggaacacggaggataaagtcagccatgtgagcactgggggtggtgccagtttggagctcctggaaggtaaagtccttcctggggtggatgctctcagcaatatttagtactttcctgccttttagttcctgtgcacagcccctaagtcaacttagcattttctgcatctccacttggcattagctaaaaccttccatgtcaagattcagctagtggccaagagatgcagtgccaggaacccttaaacagttgcacagcatctcagctcatcttcactgcaccctggatttgcatacattcttcaagatcccatttgaattttttagtgactaaaccattgtgcattctagagtgcatatatttatattttgcctgttaaaaagaaagtgagcagtgttagcttagttctcttttgatgtaggttattatgattagctttgtcactgtttcactactcagcatggaaacaagatgaaattccatttgtaggtagtgagacaaaattgatgatccattaagtaaacaataaaagtgtccattgaaa

SEQ ID NO: 574 - DNA, 1399 bp, HOMO SAPIENS
agtgtgaaatcttcagagaagaatttctctttagttctttgcaagaaggtagagataaagacactttttcaaaaatggcaatggtatcagaattcctcaagcaggcctggtttattgaaaatgaagagcaggaatatgttcaaactgtgaagtcatccaaaggtggtcccggatcagcggtgagcccctatcctaccttcaatccatcctcggatgtcgctgccttgcataaggccataatggttaaaggtgtggatgaagcaaccatcattgacattctaactaagcgaaacaatgcacagcgtcaacagatcaaagcagcatatctccaggaaacaggaaagcccctggatgaaacacttaagaaagcccttacaggtcaccttgaggaggttgttttagctctgctaaaaactccagcgcaatttgatgctgatgaacttcgtgctgccatgaagggccttggaactgatgaagatactctaattgagattttggcatcaagaactaacaaagaaatcagagacattaacagggtctacagagaggaactgaagagagatctggccaaagacataacctcagacacatctggagattttcggaacgctttgctttctcttgctaagggtgaccgatctgaggactttggtgtgaatgaagacttggctgattcagatgccagggccttgtatgaagcaggagaaaggagaaaggggacagacgtaaacgtgttcaataccatccttaccaccagaagctatccacaacttcgcagagtgtttcagaaatacaccaagtacagtaagcatgacatgaacaaagttctggacctggagttgaaaggtgacattgagaaatgcctcacagctatcgtgaagtgcgccacaagcaaaccagctttctttgcagagaagcttcatcaagccatgaaaggtgttggaactcgccataaggcattgatcaggattatggtttcccgttctgaaattgacatgaatgatatcaaagcattctatcagaagatgtatggtatctccctttgccaagccatcctggatgaaaccaaaggagattatgagaaaatcctggtggctctttgtggaggaaactaaacattcccttgatggtctcaagctatgatcagaagactttaattatatattttcatcctataagcttaaataggaaagtttcttcaacaggattacagtgtagctacctacatgctgaaaaatatagcctttaaatcatttttatattataactctgtataatagagataagtccattttttaaaaatgttttccccaaaccataaaaccctatacaagttgttctagtaacaatacatgagaaagatgtctatgtagctgaaaataaaatgacgtcacaagac

SEQ ID NO: 575 - DNA, 4403 bp, HOMO SAPIENS
gcccggcgttaacaaagggagccgataccgaccggcgtgggcgcggagcgggcggccgccaccgagcgtgctgagcaaccgcagcctccgcggccgagagtgcagcgagcaaggggagagccagttgcgcagagccctgcaaccagcagtccagggagaagtggtgaatgtcatggagcccagctgaaatggactggcccccttgagcctgtcccaagccctggtgccaggtgtccatccccgtgctgagatgagttttgatcatcctgagaaaaatgggccttggcctgcagacccaataaaccttccctcccatggataatagtgctaattcctgaggacctgaagggcctgccgcccctgggggattagccagaagcaggcttgttttcctgctcagaacaaagtgacttccctgaacacatcttcattatgattcacaccaacctgaagaaaaagttcagctgctgcgtcctggtctttcttctgtttgcagtcatctgtgtgtggaaggaaaagaagaaagggagttactatgattcctttaaattgcaaaccaaggaattccaggtgttaaagagtctggggaaattggccatggggtctgattcccagtctgtatcctcaagcagcacccaggacccccacaggggccgccagaccctcggcagtctcagaggcctagccaaggccaaaccagaggcctccttccaggtgtggaacaaggacagctcttccaaaaaccttatccctaggctgcaaaagatctggaagaattacctaagcatgaacaagtacaaagtgtcctacaaggggccaggaccaggcatcaagttcagtgcagaggccctgcgctgccacctccgggaccatgtgaatgtatccatggtagaggtcacagattttcccttcaatacctctgaatgggagggttatctgcccaaggagagcattaggaccaaggctgggccttggggcaggtgtgctgttgtgtcgtcagcgggatctctgaagtcctcccaactaggcagagaaatcgatgatcatgacgcagtcctgaggtttaatggggcacccacagccaacttccaacaagatgtgggcacaaaaactaccattcgcctgatgaactctcagttggttaccacagagaagcgcttcctcaaagacagtttgtacaatgaaggaatcctaattgtatgggacccatctgtataccactcagatatcccaaagtggtaccagaatccggattataatttctttaacaactacaagacttatcgtaagctgcaccccaatcagcccttttacatcctcaagccccagatgccttgggagctatgggacattcttcaagaaatctccccagaagagattcagccaaaccccccatcctctgggatgcttggtatcatcatcatgatgacgctgtgtgaccaggtggatatttatgagttcctcccatccaagcgcaagactgacgtgtgctactactaccagaagttcttcgatagtgcctgcacgatgggtgcctaccacccgctgctctatgagaagaatttggtgaagcatctcaaccagggcacagatgaggacatctacctgcttggaaaagccacactgcctggcttccggaccattcactgctaagcacaggctcctcactcttctccatcaggcattaaatgaatggtctcttggccaccccagcctgggaagaacattttcctgaacaattccagcctgctccttttactctaggggcctctgtcagcaagaccatggggacttcaagagcctgtggtcaggaaatcaggtccagccttccctgtagccagacagtttatgagcccagagcctcctgccacacacatgcacacatatctagcattctttccagacagcatcctccccgccttccaccttggtagatgcaaggtctatctctcccatcagggctgccaaagctgggctttgtttttcccagcagaatgatgccattctcacaaaccaatgctctatattgcttgaagtctgcatctaaatattgatttcacgttttaaagaaattctcttaaattacaattgtgcccaatgcagggtggctctggggggcaagtaggtggtacaggggattggaaacatgctccgcgcctccagagaaaagttgctcccgaggtccatgcccctggaacgtgttcctatcactctggctggttgggctggtccttagactgggtgcttatgattaaagggtcttggttagcccactttccctctccatgtggagatggaaggtagagaaggatacagtgtctatcctcaagttgctacggttcagtgagagaggcagacatctgaacaggcaggtaggattcagtgtgctcagtgcactggggatttggagagagatgggcttgctctctctgtgcacccaggagggccacgcacttaaaactgtgtttgtggatcagagaaggctttatagcacagggggcattcagatgagtcttagaggaagagaagaaacatggcaagcagattacatctgagccgtttgaattgtgtttttctttcttcccatgtttattttctaagatctacctgaacttagagactcaagatatttttttaggaaacctcctacccatgtctgaggtagcaagtgcagcctcacgacagataccaggcaatccagagccacaaaacgtgattcctccaggctctgcctggcctgaccctgtcctgtcagctgggtttacataccagtcccattcttccttttcaatacctacccccaaatcttctcctaaccaccatctgttttttttttttaaagcattttttgctttaaaagcatcctgaccccaatttctttgagctcacgggccttttgctgaaggtctctcagggtgtagtggtgtggctctctggacttaacgtcactctcagaggtcagaaccttggagatcagaactgattctcaccaggtgtgagaggtgtggtagcagattgcaatgctctgcacctcttccttgcaagtgagcaacttcaggctctctgggcagaggctggcccactgtagtttgcagacatgctctccagatggttttactaagtcccctctccctgatagggaatcctgctggaccagcgcagccctggtgtggagaggttaaaagacttgcacaggatcaccaagtcatgctgtagagccaggattcctagacccagggctctgcactctcaaggctggccccatgtgctcaaggggatctaatgtttgggctccaaactaaccatctcggagctgggctcctcatttactgccaaaccctcagcttatgtagctagaaagggccctggagtgagaaagcctggattttcaaattgatgctcccctactgactagctgtgccactctgggcaaatgctcttccttgagcctgtttccacacctgtaaagtggggatgatgatcctatctcactgcttttgtgaggattacaggaaagcacctgtcctggctctgtacctggcacgtagtaggtgctcagttcatgctggtttccttcctgcctttagtagggacctgctctgtgctcacacctcggctgcatgcaccctgctgtgacggaggctagtgtggaagaggtcctgtcctcagggaattaactgtcttattgggagacaacaactgtcctccttggaacacccaagaaaccatgcaaagcagtggacaacacagaacacgccctcctcctcgctgcctgcagctccaatctgattctgcttgggaatgggcggagcacgtgggctgcttaactgctgtataggacaagccccttacccctctctgggcccatgaattcctggcttggtttatgttctgatttgacacactgattttaatcttcgaatcatgacactgagtgcagaggaggtggcattccgacagcaggacatacatgttggtgtgaagactgggacgacactgggtagaatctagtttttaattattattaatataaaggatcaaattaatttaaatatgattctgaagtctacagaacttttagttctgtgctgtctatgtggacactttggtaaaatgcaaattatgatatggacgttatcattggtctggtgagatgtttcatatttgtgacagttaatttaaaaattatgagttaatgctgcctgtgtctatggggttctgtcttctttgatagccatctattcatctggatcatgggaccctctctaatccttccaccaatcaaataagctattgctattggtttggagttgagatatcagtctcggaaacttctgaaaaatgctaataattacccaaggattatgtcaaattttaaaataaatgtgtgtgtgtttctttaa

SEQ ID NO: 576 - DNA, 4752 bp, HOMO SAPIENS
ccagttggttgtccctgccgtctcggaagggttagcacacagccaggtctgtttttgatgtatgtaattgaagatttataaagaaaagcttctcctctgcctcatccgcagtcattttttttccaatgccagttcccagcaggcatataaatattggtcgttctcagagctgggatgctgctgggtggtacgagggcccctgggagaacgccgagtccctgcggcctctggggaggagaagctccctgacgtatggcacagcagaggggacttggtttgagccaaaccaccgaccacaggacgctgccctgcccgtggccgccgagccctacctgtaccgggaggccgtttataactcagtggctgcaagaaaggggtctactcctgacttcaccttctacgacagcagacaggcagtgatgtctggtcgcagccccctgctgccacgggagtactacagtgatccgtctggagctgctagggtacccaaagagcctcccctctatcgggacccaggagtcagccggccggtccccagctacggagtgcttggcagcagaacgtcatgggatccaatgcaaggccggtcacctgccctgcaggacgccggtcacctgtaccgggatcctggaggtaaaatgatccctcaggggcggcagacacagagcagggctgcatctcccgggcggtatggacgggagcagcccgacaccaggtatggggcggaggtgcctgcctaccccctcagccaggtcttcagcgacatcagcgaaagacccattgaccctgcccctgccagacaggtggccccgacgtgcctggttgtggaccccagttcagctgctgcccccgaaggcagcacaggggtggccccaggggccctgaatcgtggctacgggcctgcccgggaaagcatcccatccaagatggcttacgagacttacgaagctgacctgtccaccttccagggtcctggtggcaagaggaccgtgctccctgagttcctggcctttctgcgggcggaggggctggcagaggccacgctgggagccctactgcagcagggctttgactccccggccgtcctggctaccctggaggacgcggatatcaagtctgtcgcacccaacctgggccaggcccgtgttctgagccgcctggccaatagctgcaggaccgaaatgcagctgcggaggcaggaccgggggggcccgctgccccgggcgcggtccagcagcttcagccaccgaagcgaactgctccatggtgacttggcttctctgggcgctgcggctcctctgcagacagcatccccccgagctggagacccggctcgccgtccctccagcgcaccatctcagcacctcctggagacggcagccacctattctgcccctggcgtgggcacccatgccccacacttcccctccaactccgggtacagctctcccaccccttgcgccctgacagcgcgtctgagccccacgtaccccctgcaggcaggggtggccttgactaacccgggcccctcaaacccccttcacccaggccccagaacagcctactccacggcatacacggtgcccatggagctgctaaagagggagcgcaacgtggccgcctctccgctgcccagccctcacggcagcccccaggtcttgcggaagccaggtgcacccctggggccatccaccctgccgccggccagccagagcctccacacgcctcactcaccgtaccagaaggtggcccggcgcacaggggcacccatcatcgtgtccaccatgcttgcaccagaaccaagtatccgcccccagatcatgaacggccccctgcacccccgccccctggtggcgctgctggacggccgcgactgcactgtggagatgcccatcctgaaggacctggccactgtggccttctgtgacgcgcagtcgacgcaggaaatccacgagaaggttctaaacgaagccgtgggcgccatgatgtaccacaccatcaccctcaccagggaggacctggagaagttcaaggccctgagagtgatcgtgcggataggcagtggctatgacaacgtggacatcaaggctgccggcgagctcggaattgccgtgtgcaacatcccgtctgcagccgtggaagagacagcggactctaccatctgccacatcctcaacctgtaccggaggaacacgtggctgtaccaggcactgcgggaaggcacgcgggttcagagcgtggagcagatccgcgaggtggcctcgggagcggcccgcatccgtggggagacgctgggcctcattggctttggtcgcacggggcaggcggttgcagttcgagccaaggcctttggattcagcgtcatattttatgacccctacttgcaggatgggatcgagcggtccctgggcgtgcagagggtctacaccctgcaggatttgctgtatcagagcgactgcgtctccttgcactgcaatctcaacgaacataaccaccacctcatcaatgactttaccataaagcagatgaggcagggagcattccttgtgaacgcagcccgtggcggcctggtggacgagaaagccttagcacaagccctcaaggagggcaggatacgaggggcagccctcgacgtgcatgagtcagagcccttcagctttgctcagggtccgttgaaagatgccccgaatctcatctgcactcctcacactgcctggtacagtgagcaggcgtcactggagatgagggaggcagctgccaccgagatccgccgagccatcacaggtcgcatcccagaaagcttaagaaattgtgtgaacaaggaattctttgtcacatcagcgccttggtcagtaatagaccagcaagcaattcatcctgagctcaatggtgccacatacagatatccgccaggcatcgtgggtgtggctccaggaggacttcctgcagccatggaagggatcatccctggaggcatcccagtgactcacaacctcccgacagtggcacatccttcccaagcgccctctcccaaccagcccacaaaacacggggacaatcgagagcaccccaacgagcaatagcagagaatgccagaaggtaatcactcagatacacttgggaccaagagacagtgaaaaatagatgaactaagagaaaaagaatcggatggtctttgtaactgattctggacatatgcatcattgatgttgcagtgttgaaactacaagagctagaaaactgaagatgtcgtctgcttacggaagcgctgaaagactaggatgtgatttattaacgaccaacttctgttattgtgtgttaagtttttcatctgtgcatcaaatcacaaaaagaataaatagagctttttcctttatcagtcccttgggcacagcaggtcctgaacaccctgctctacaatgttgcatcaagagttcaaacaacaaaataaaaaatattaagaggaaatccccatcctgtgacttgagtcccttaagtctacaggggctggtgacctctttttgctaataggaaaatcacattactacaaaatggggagaaaactgtttgcctgtggtagacacctgcacgcataggattgaagacagtacaggctgctgtacagagaagcgcctctcacatctgaactgcatactgagcgggcaagtcggttgtaagttcagtaaaaccctctgatgatgcaaaaaaaaaaaaaaaagtattaagtttcacaagctgtttgtactcaaatatattttctcagtttcagatcctctgctattttattgagtggaaagtcttgagctaaaagggttcaagaagaataatgttgcatttccttatgtctcaggaaacactttttatggtaacttgtcagattgtctatgaacaaacccacttttttagacattgataaagtcttcttttcttcacgtgatattttatacaagaacacttcagatgtattagatgtgactgattttaacaaatcctattagatttgtatcaactagttacatgttctattcatagtcttttgtgaatcattgcctttttgtttaaaaagatggcctattttgagcctttgtataggtacattcctgtttttgtgacaaaagaaaaactttaaaattgtcccaaacagaaaaataatggctatcagaagtatgttttgttttagtgtgagttaccgttactgtatttgtttattgtaaaggtggacatttagcgttcagtgcagttttcaataaaaagtaattaaaatttgttaagttctgaaattcaagtacatctcactaatgtaaatgttctctacttgagatgtttaaggcaattgcattgtcaattagccaatttccagctcttgttactacagggttccataaccagactcaagaccgctgacaattaattacctgtgataacaaaaagtttaattgaaaaatcaaaacctcacacaagtccatcattatcacgtcatgccatccttaagatgcaatggtgggttagtgctaaatcaattcaaaaaaaaacaaagttgctcaacttttagagttctgactttaatctaccccaaagcaaaatgacctggacctggttcaagggagggaagtgaaccttgaaactgttttgccaataacctaacaaacaaaatgatatttacaaagaagtgttgcaaatagtcccatgagttaagagcttgatttaatggatcttctttttaaatagaattaaacctttatactaaaagta

SEQ ID NO: 577 - DNA, 6364 bp, HOMO SAPIENS
ctgggatagaagcggcaggagcagcgttggcaccggcgaaccatggctgggattttctatttcgccctattttcgtgtctcttcgggatttgcgacgctgtcacaggttccagggtataccccgcgaatgaagttaccttattggattccagatctgttcagggagaacttgggtggatagcaagccctctggaaggagggtgggaggaagtgagtatcatggatgaaaaaaatacaccaatccgaacctaccaagtgtgcaatgtgatggaacccagccagaataactggctacgaactgattggatcacccgagaaggggctcagagggtgtatattgagattaaattcaccttgagggactgcaatagtcttccgggcgtcatggggacttgcaaggagacgtttaacctgtactactatgaatcagacaacgacaaagagcgtttcatcagagagaaccagtttgtcaaaattgacaccattgctgctgatgagagcttcacccaagtggacattggtgacagaatcatgaagctgaacaccgagatccgggatgtagggccattaagcaaaaaggggttttacctggcttttcaggatgtgggggcctgcatcgccctggtatcagtccgtgtgttctataaaaagtgtccactcacagtccgcaatctggcccagtttcctgacaccatcacaggggctgatacgtcttccctggtggaagttcgaggctcctgtgtcaacaactcagaagagaaagatgtgccaaaaatgtactgtggggcagatggtgaatggctggtacccattggcaactgcctatgcaacgctgggcatgaggagcggagcggagaatgccaagcttgcaaaattggatattacaaggctctctccacggatgccacctgtgccaagtgcccaccccacagctactctgtctgggaaggagccacctcgtgcacctgtgaccgaggctttttcagagctgacaacgatgctgcctctatgccctgcacccgtccaccatctgctcccctgaacttgatttcaaatgtcaacgagacatctgtgaacttggaatggagtagccctcagaatacaggtggccgccaggacatttcctataatgtggtatgcaagaaatgtggagctggtgaccccagcaagtgccgaccctgtggaagtggggtccactacaccccacagcagaatggcttgaagaccaccaaagtctccatcactgacctcctagctcataccaattacacctttgaaatctgggctgtgaatggagtgtccaaatataaccctaacccagaccaatcagtttctgtcactgtgaccaccaaccaagcagcaccatcatccattgctttggtccaggctaaagaagtcacaagatacagtgtggcactggcttggctggaaccagatcggcccaatggggtaatcctggaatatgaagtcaagtattatgagaaggatcagaatgagcgaagctatcgtatagttcggacagctgccaggaacacagatatcaaaggcctgaaccctctcacttcctatgttttccacgtgcgagccaggacagcagctggctatggagacttcagtgagcccttggaggttacaaccaacacagtgccttcccggatcattggagatggggctaactccacagtccttctggtctctgtctcgggcagtgtggtgctggtggtaattctcattgcagcttttgtcatcagccggagacggagtaaatacagtaaagccaaacaagaagcggatgaagagaaacatttgaatcaaggtgtaagaacatatgtggacccctttacgtacgaagatcccaaccaagcagtgcgagagtttgccaaagaaattgacgcatcctgcattaagattgaaaaagttataggagttggtgaatttggtgaggtatgcagtgggcgtctcaaagtgcctggcaagagagagatctgtgtggctatcaagactctgaaagctggttatacagacaaacagaggagagacttcctgagtgaggccagcatcatgggacagtttgaccatccgaacatcattcacttggaaggcgtggtcactaaatgtaaaccagtaatgatcataacagagtacatggagaatggctccttggatgcattcctcaggaaaaatgatggcagatttacagtcattcagctggtgggcatgcttcgtggcattgggtctgggatgaagtatttatctgatatgagctatgtgcatcgtgatctggccgcacggaacatcctggtgaacagcaacttggtctgcaaagtgtctgattttggcatgtcccgagtgcttgaggatgatccggaagcagcttacaccaccaggggtggcaagattcctatccggtggactgcgccagaagcaattgcctatcgtaaattcacatcagcaagtgatgtatggagctatggaatcgttatgtgggaagtgatgtcgtacggggagaggccctattgggatatgtccaatcaagatgtgattaaagccattgaggaaggctatcggttaccccctccaatggactgccccattgcgctccaccagctgatgctagactgctggcagaaggagaggagcgacaggcctaaatttgggcagattgtcaacatgttggacaaactcatccgcaaccccaacagcttgaagaggacagggacggagagctccagacctaacactgccttgttggatccaagctcccctgaattctctgctgtggtatcagtgggcgattggctccaggccattaaaatggaccggtataaggataacttcacagctgctggttataccacactagaggctgtggtgcacgtgaaccaggaggacctggcaagaattggtatcacagccatcacgcaccagaataagattttgagcagtgtccaggcaatgcgaacccaaatgcagcagatgcacggcagaatggttcccgtctgagccagtactgaataaactcaaaactcttgaaattagtttacctcatccatgcactttaattgaagaactgcactttttttacttcgtcttcgccctctgaaattaaagaaatgaaaaaaaaaaacaatatctgcagcgttgcttggtgcacagattgctgaaactgtggggcttacagaaatgactgccggtcatttgaatgagacctggaacaaatcgtttctcagaagtacttttctgttcatcaccagtctgtaaaatacatgtacctatagaaatagaacactgcctctgagttttgatgctgtatttgctgccagacactgagcttctgagacatccctgattctctctccatttggaattacaaccattgtattttgtttgtggcataaattacagtcatctgtctttcactggaatgaagaccatgcctaggaacattttttaaggactcagctgtggcttttagggcttggttcataccatgggggaaaaaaaagtcctaggagaaagcgacgtggctcattagtgttgcctcttcagtgctcaagccgcctggtggattcctatgacacagggggcctggaaagaaagggaaagtggatttaaaatatatatatacgtaacccaagccccataacccctaactggacaaatgaggtctgtttctttgggcctgaggctgtgccatataaagtcttattttgggactttacaaacttgtcctaactatcttgtggatagtgggctgtgacaatctggaatagagaacgttcacacttcgctcctttaaagaagcgaccccagatctgcaagggagtagattctgctatcttggcctcacagcccttcctgttgattacaaagcccgtggaagaaaacagaacacaccctcctcagttccgtctaaatgtgtttcttctgcttcaattacaccagttctggggcaaagacactgatgaaacaacacccatacctgaaaagaataaatgtgtgactttcaaatcccctttcgcagtgaaagaaacagcaaacacttaagattcagcatctgttctccagttgcactgaggaatgcactgtctcgcagcaccagctctgcagagcccttgccccagactctttgcggttttatttatatgtatttccatatttcattcctgtgtgtcactgctgcattggtgtggcagcaagtgaccaaatgctacaggtcttactatggacaccaggtcaggtgcaaccacacaaaacaaagccagttccatgagctgcctatgatatgcattgcggaagtaacattttacccagggtgtgccattgcagtgatataaatatatttttttcttagactaaatatgagctgactatctcttttgatgtgtgtacataggtgtgagtgtgtgtgtatgcgtgcctgtctgtgtgcgggtgtgtgtatgtgcatagcctcatgcttaggactacccatgaatgttgtggaatgctacacctggagagttctggttttccaccagtttcaagatgaagaactacatgatacagtggacctggagaccatccccttggaaagacaacccagagatgttcagcatcctgtatctacacgcatcctgtatctacacgtgtattttgtagctgtcacactaaccttaataagaattctacagctttggacagaggcattttcaccttaatggtgaagtaatttaaaatataaatccattcaggtgacaacccatcatcaaaattacaaattttctgattgaactcatctgaatcatcagttccttgatggagagagagaaggagatggaatgtgtctggtaaccccaaatggagtacaagtagcctttgttttcctgcataaatggacttgttgaatgcgaacgaatatatgcaattcatatacttttggagatgaacgtagatatgtgtgtcagctttgagatggtgtgtcctggattaatactttgtctcccaatatcacagaaaaatacatgccagtgactcttgaggttaaggtagttgggatgaaatggcctcaggcaatttcacattccctaattacctggaaagttctacagtaattaatatgcagctaactcctgttgccctcacaagagcatcagccttctagaatcggagctccggagtgtgaagattcagtattgatatgatatgtataccaaactccagccaacttactgccatttttcataatctgagtggctgccttgcttatcctaagctgtggttgcagaaaccgtggccatttatataagctataacatcaaatcagggaaaaatgaggaaaaaaaatagattctgaaccatttattgttgaataagtagagaaaatcatcaataaatatttattacattctgacagggtgtgtggcattgtgttctatgccagagtgacaaagttgattcacccctttttggggaccttaatatattttttaagggatgtgcctatgcattgatgcctgaaaaatatgtataaagaaatgaggttgactcttctgagcagttcatcttttccagaggtaagggtaggaggccaacttcagggtctgggtctgagcccgtgggcaagccctggccgagtgagctccaatgctaactcatgtgccgatctctagagcagtgggaaactaccccgctgcaccaaatcaagtagcttcaccttgtgtatgcaggccccaagttattttttagcaatcttacgagtgaaatgttctggtgggttgaaaaacgttcttattttaaagaaaggttgtgctcgctacactgctggtgtgtgcattctgagacctcttgtattcaatctgtgaaggatatgtgtattaatccgtacacccgtatagcctcaatatttgtctgaagacacttaaattctgacccataaaggaaagttctagaagcaatattttcacttatttaacattctccaaacaacatcaagcattgatacacactgaagagtgcgtttattttttgtatcactctaagtatgttggaatatgcaaggactgtggttcaaattagaatgtataaggcatattataatttagttcatactgaataagaaattaacagaacattgttcggttcacacgttccaaactttgagtgatttctggagttagacatagattttctattttgttttaatttgtcaaggtatttttcttcccttcatgaactttaggtacacataacttatgtcatttatttatggtcttttatacctagtttgtaaaattgtaaaatagcaaactaaatgcaaagagtttgcatttgaaaataataaagtagttgccgtatacaaccctgcaaaaaaaaaaaaaaaaaa

SEQ ID NO: 578 - DNA, 1858 bp, HOMO SAPIENS
gcgtgctcctcgcttcctccgcggtcttccgagcggtcgcgtgaactgcttcctgcaggctggccatggcgcttcacgttcccaaggctccgggctttgcccagatgctcaaggagggagcgaaacacttttcaggattagaagaggctgtgtatagaaacatacaagcttgcaaggagcttgcccaaaccactcgtacagcatatggaccaaatggaatgaacaaaatggttatcaaccacttggagaagttgtttgtgacaaacgatgcagcaactattttaagagaactagaagtacagcatcctgctgcaaaaatgattgtaatggcttctcatatgcaagagcaagaagttggagatggcacaaactttgttctggtatttgctggagctctcctggaattagctgaagaacttctgaggattggcctgtcagtttcagaggtcatagaaggttatgaaatagcctgcagaaaagctcatgagattcttcctaatttggtatgttgttctgcaaaaaaccttcgagatattgatgaagtctcatctctacttcgtacctccataatgagtaaacaatatggtaatgaagtatttctggccaagcttattgctcaggcatgcgtatctatttttcctgattccggccatttcaatgttgataacatcagagtttgtaaaattctgggctctggtatcagttcctcttcagtattgcatggcatggtttttaagaaggaaaccgaaggtgatgtaacatctgtcaaagatgcaaaaatagcagtgtactcttgtccttttgatggcatgataacagaaactaagggaacagtgttgataaagactgctgaagaattgatgaattttagtaagggagaagaaaacctcatggatgcacaagtcaaagctattgctgatactggtgcaaatgtcgtagtaacaggtggcaaagtggcagacatggctcttcattatgcaaataaatataatatcatgttagtgaggctaaactcaaaatgggatctccgaagactttgtaaaactgttggtgctacagctcttcctagattgacacctcctgtccttgaagaaatgggacactgtgacagtgtttacctctcagaagttggagatactcaggtggtggtttttaagcatgaaaaggaagatggcgccatttctaccatagtacttcgaggctctacagacaatctgatggatgacatagaaagggcagtagacgatggtgttaatactttcaaagttcttacaagggataaacgtcttgtacccggaggtggagcaacagaaattgaattagccaaacagatcacatcatatggagagacatgtcctggacttgaacagtatgctattaagaagtttgctgaggcatttgaagctattccccgcgcactggcagaaaactctggagttaaggccaatgaagtaatctctaaactttatgcagtacatcaagaaggaaataaaaacgttggattagatattgaggctgaagtccctgctgtaaaggacatgctggaagctggtattctagatacttacctgggaaaatattgggctatcaaactcgctactaatgctgcagtcactgtacttagagtggatcagatcatcatggcaaaaccagctggtgggcccaagcctccaagtgggaagaaagactgggatgatgaccaaaatgattgaaattggcttaatttttactgtaggtgaaggctgtatttgtagtagtactcaagaatcacctgatgttttcttattctccttaaattaagagttattttgtgtttgtattcttggctggatgttataataaacatattgttactgtc

SEQ ID NO: 579 - DNA, 7551 bp, HOMO SAPIENS; identical to SEQ ID NO: 190

SEQ ID NO: 580 - DNA, 813 bp, HOMO SAPIENS
ctcagcgcctccgccccggggcccccgctcacccaggtatcgactccgcagccgggacgggtcctccagcccgagggaccttttcctcacgtcccacaacagccagggacgagaacacagccacgctcccacccggctgccaacgatccctcggcggcgatgtcggccgccggtgcccgaggcctgcgggccacctaccaccggctcctcgataaagtggagctgatgctgcccgagaaattgaggccgttgtacaaccatccagcaggtcccagaacagttttcttctgggctccaattatgaaatgggggttggtgtgtgctggattggctgatatggccagacctgcagaaaaacttagcacagctcaatctgctgttttgatggctacagggtttatttggtcaagatactcacttgtaattattccaaaaaattggagtctgtttgctgttaatttctttgtgggggcagcaggagcctctcagctttttcgtatttggagatataaccaagaactaaaagctaaagcacacaaataaaagagttcctgatcacctgaacaatctagatgtggacaaaaccattgggacctagtttattatttggttattgataaagcaaagctaactgtgtgtttagaaggcactgtaactggtagctagttcttgattcaatagaaaaatgcagcaaacttttaataacagtctctctacatgacttaaggaacttatctatggatattagtaacatttttctaccatttgtccgtaataaaccatacttgctcgtaaaaaaaaaaaaaaaaaaaa

SEQ ID NO: 581 - DNA, 3522 bp, HOMO SAPIENS; identical to SEQ ID NO: 201

SEQ ID NO: 582 - DNA, 1634 bp, HOMO SAPIENS
gggtggggaagcttagagaccggtgagggagcagagctggggcgcctgtgtacagggatagagcccggcggcagcagggcgcggcttccctttcccggggcctggggccgcaatcaggtggagtcgagaggccggaggaggggcaggaggaaggggtgcggtcgcgatccggacccggagccagcgcggagcacctgcgcccgcggctgacaccttcgctcgcagtttgttcgcagtttactcgcacaccagtttcccccaccgcgctttggattagtgtgatctcagctcaaggcaaaggtgggatatcatggcatctatctgggttggacaccgaggaacagtaagagattatccagactttagcccatcagtggatgctgaagctattcagaaagcaatcagaggaattggaactgatgagaaaatgctcatcagcattctgactgagaggtcaaatgcacagcggcagctgattgttaaggaatatcaagcagcatatggaaaggagctgaaagatgacttgaagggtgatctctctggccactttgagcatctcatggtggccctagtgactccaccagcagtctttgatgcaaagcagctaaagaaatccatgaagggcgcgggaacaaacgaagatgccttgattgaaatcttaactaccaggacaagcaggcaaatgaaggatatctctcaagcctattatacagtatacaagaagagtcttggagatgacattagttccgaaacatctggtgacttccggaaagctctgttgactttggcagatggcagaagagatgaaagtctgaaagtggatgagcatctggccaaacaagatgcccagattctctataaagctggtgagaacagatggggcacggatgaagacaaattcactgagatcctgtgtttaaggagctttcctcaattaaaactaacatttgatgaatacagaaatatcagccaaaaggacattgtggacagcataaaaggagaattatctgggcattttgaagacttactgttggccatagttaattgtgtgaggaacacgccggcctttttagccgaaagactgcatcgagccttgaagggtattggaactgatgagtttactctgaaccgaataatggtgtccagatcagaaattgaccttttggacattcgaacagagttcaagaagcattatggctattccctatattcagcaattaaatcggatacttctggagactatgaaatcacactcttaaaaatctgtggtggagatgactgaaccaagaagataatctccaaaggtccacgatgggctttcccaacagctccaccttacttcttctcatactatttaagagaacaagcaaatataaacagcaacttgtgttcctaacaggaattttcattgttctataacaacaacaacaaaagcgattattattttagagcatctcatttataatgtagcagctcataaatgaaattgaaaatggtattaaagatctgcaactactatccaacttatatttctgctttcaaagttaagaatctttatagttctactccattaaatataaagcaagataataaaaattgttgcttttgttaaaagtaaaaaaaaaaaaaaaaaa

SEQ ID NO: 583 - DNA, 2611 bp, HOMO SAPIENS; identical to SEQ ID NO: 86

SEQ ID NO: 584 - DNA, 6162 bp, HOMO SAPIENS
gctagttcctggtgcgtcacgggggagttccttaaaggggaagcgagccgggctacggggcgagcgcggggtgcggtggtcggcggggaggcccccgcgctttaaaataatgcccgcggcgcccgcgcgaccatgcaatggcgagcgctcgtcctggggctggtgctcctccggcttggcctccatggagtattgtggctcgtcttcgggctggggcccagcatgggcttctaccagcgctttccgctcagcttcggcttccagcgtctgaggagccccgacggccccgcgtcgcccacctcggggcccgtgggccggcctgggggggtatccgggccgtcgtggctgcagccgccggggaccggggcagcgcagagcccgcgcaaggctccgcggcgtcctgggccggggatgtgcggcccagccaactggggctacgtgctgggcggccggggccgcggcccggacgagtacgagaagcgctacagcggcgccttccctccgcagctgcgtgcccagatgcgcgacctggcacggggcatgttcgtctttggctacgacaactacatggctcacgccttcccccaggacgagctcaaccccatccactgccgcggccgtgggcccgaccgcggggacccttcaaatctgaacatcaatgatgtactagggaactactcattgactcttgttgatgcattggatacacttgcaataatgggaaattcatccgagttccagaaagccgtcaagttagtgatcaacacagtttcatttgacaaagattccaccgtccaagtctttgaggccacgataagggtcctgggaagcctcctttctgctcacagaataataactgactccaagcagccctttggtgacatgacaattaaggactatgataatgagttgttatacatggcccatgacctggcggtgcggctcctccctgcttttgaaaacaccaagacagggattccatatcctcgggtgaatctaaagacaggagttcctcctgacaccaataatgagacatgcacagcgggagccggttccctcctggtggaatttgggattctgagtcgactcctgggggactccacatttgagtgggtggccagacgagcagtgaaagccctttggaacctccggagcaatgatacaggattactaggcaatgtcgtgaacattcagacgggccactgggttggaaagcagagtggcctgggtgccgggctggactccttctatgaatacctcttgaaatcttacattctctttggagaaaaagaagacctagaaatgtttaatgctgcatatcagagtattcagaactacttaagaagagggcgggaagcctgcaatgaaggagaaggagaccctccactctatgtcaacgtgaacatgttcagtgggcagctgatgaacacctggattgactctctgcaggcctttttccctggactgcaggtgctgataggagatgtggaagatgccatctgccttcatgccttctactatgccatatggaaacgatatggtgccctccctgagagatataactggcagctgcaggcccctgacgttctcttctacccactgagaccagagttagtggaatccacatatctcctctaccaggcaaccaagaatcccttctacctccatgtaggaatggatattctgcagagtctggaaaagtacacaaaagtcaagtgtgggtacgccacgctgcatcacgtcattgacaagtccacagaagaccggatggagagcttctttctcagtgagacctgtaaatatttgtatctgctgtttgatgaagacaatccagtacacaagtctggaaccagatacatgttcacaacagagggacacattgtatctgtggatgagcatcttcgggaattgccatggaaggaattcttctctgaagagggagggcaggaccaagggggaaagtctgtgcacaggccgaaacctcatgagttaaaagtcatcaactccagctccaactgcaatcgtgtacctgatgagaggaggtactccctgcccttaaagagcatctacatgcgacagattgaccagatggttggtttgatttgatctgctctctgtgaggcctcatcttgaaccagaccttaacgaccaaacccagaccatgccaaagtccagtctgaaatgaaaggggacagaagtcttgctgtccatggtggtgtaggaatttctgtgcaacacctcaccacgtctggttaatccttgcacacttcagtgtttctctcctgttcaataaaatgccctgttaaggatataatttgaagtgagaagatacatggaaattgccctcttatgacatgttgatgttataagcacaatagatggggcatctttggattgatgttcacagctttatacttcagaacctaagtctcttcactttgctggcacctgctatactggagtattgctatgtctttaaaaaattttttttattatattttatttttttgagacagggtcttgatatttttttgggacagggttacctgggctcaagtgatccttctgcctcagcctcccgagtagctgggattacaggtgagcaccactgtacctggctagctacttctttgttagaggattgagaatgaaatttctgcaaaagggcccatggttcatttggtatccctatttaattgcattgaaaatgtcatcctttctgttgttagataattggggtcttcccctgatatccaaccgtgattttggatcacatgggagaaaaagtcatccagtttttcatgtttgcctcaagtaatctttacagtgttacaaattatttgcttaagaagaatggtcttaaccagaattcttaacagatagtctcttaggttattatgttatggtctaagaggttaactgacatcttttgggtggtattttgcattttgaatatgaacttacctgaggaactcccatagttccagaatcaggtgccttttagggagagaacaatacctaagattgtctgagcttccatctttctcatatttcctaagcaaggattctcacttctgaccatatttgggttagagttctgttttgtttctgttttctgtgtctagtgccaattagctaaatcagggagaaagaaatgatcacatgacttttagcatccttgagccatttctctgtgtaatacaggctttagattagtgccttatattggttttggtttggggcactggatgtcgcagctactgctatggtttcaggaggcctgtttagccacatggtgagaccgtggtgaaagggggatggaaattgcttggccagtctttgcctttcatcctgtaaaagtaagcatgtagaaggaggaagttgtgctaaaatgcctttgtttttttgttattattttcttagccagaacatctctctttgaactcacactgatacacacctgctactcttacacagtgcagcagggttgactcttagtctggcttccatgaagcgtcatgggtggaaacgcattctagtaaaaaaggtaggaaatccctaaaacttccagcctcacatagcacggttctcacctgtcactgttttcccacctctaaggatttcatgtacatcttttcaaagctagaaataagcactgtctaagtttatgttgcatttttagtcaaaagggagaaatcttattccttcttgaaaattttaagtgttatggttttatatagttcagttctttgagatttttgaaaagagtattttcagtaataaacgtgccatctctatctcttaaacatttattacaacaattgttttaaaatagaaaaaataaaatgcttctattttaccttttttcatttcagaagcattattctgtttattaacagtgtcccatctactgaatagaaaactttgagaataatatatatatatattttaaatgttttcactgactcattgaaaatgttaattacacacacatgcatgcatgcacacacgagcatacttgtacctttgtctctgggcaaacaggtgggactgttagtgacccatttgggaaaatagagcatctcagagaaggaggtgagttcttcctgcctgtgatttctcttggcgctcccctcctctcccgctctggcttctgtggcggcagtggtgggtaagcactccagtgttctcttaatgaggcactttgcctgtcactcgagcaagcctgggtgttccttcctcctcatgctcctggaatagggaatagggatctcatgcttgcaaactacacaatgctgcaggtgcttcccaggggccacaggctgtcaggaaacgtgttttatgttaagtcacaaacccacttgacttctgggtactggaattaataccagtgggtgagactgagggtgagtgagttagtacatattaatcctggttgttgagcttccagactaccccgtccaaagtttgatgctatgtagtcagtggtttgtggggctggatgccagaaggttctttgagccagtttcaaaggttacttgttttttttttttttttttaaagtcagaatgttaacagctgtgatatatcctgcagggcttttgcagtttcttctgttctgtgttctgaaatactgggtagagaatggctgaggaggagattaccagagaagttgctttgctcagtgctttgccccaggattgcctcaaatctgagtggacttcatcctttgcggcggctctgagcctggcccatcttcctattcccacgtgtagctagtgtctagtgtcagctttgctcagtgtggtggaaacattttgcagaactgttgtagaaagctgccttatagttggcttgacaaagcataattctctcataacaaactttcaaatcattacagtagcttagctactttagttgatgtgaccgaggaatcccttctagaatcataggtggcaagggagggtttgctagctctccatttgcactggccattgtgaaaaaccagcttctgtattcaaatctttccttcatttttttaaattttttttttggcagcgcttgtgctggaacttactcattgtaactgaatcctcagggcttttcttgttttagatcatggactgtgcacgtgacacttaaataattttctatgtatttaaagaaaaatgcaccaggatggtgtctgtgcacgtgactattagaggagcgtctgtagaagtacctggtttggtcagtgcagttgtgcaatctgagggccttgtttcctcctcccctttccccttctccccaccaaaggaaaatatccctcttaatgatttcgtagttcagtttactgaatgattaccacctgtaattcctctttggattgtgtagactcaacatgagacattcctttctgctttctggagggcaccaggggcctttctctttgataaattttttttgtctgttgacaaaaacaaaaatcttttttcaaatgtagtgctggtgaaaaggtagggctgagtgattaccttagccacagggtggctgagcaggaactttagaagaaaatcctgagctttcctgtccattcccagcatccagctcctattctagtgcctcttccctgcagggcagggaccccttgggaaatcgaggaggtgggacgggctgggccctgtgtcccaggtttcacagggctcagggttatgctcccgcttgaatctggacgtgaatctggtaaaaatatcaagtacctgtggaactccctgattctataccctcttccttctttctgcaaggcagaggaataatatttttaaaggttattttgttttagttttaaatagcaaaacacaagctgcatttttatttattttgcataagaaaggtaaatctttttacaaaaaaaagtatagagttggaaactctgggaaaacttacggaaatacacaaatgcttctctgtaatgtgcaatatgctttgcaactgtagatgatattttatgtttaatctgtaaataagaaatgtatttaaattaaaagggatctttttgtaaaaggaccaaatgttcttttataaatgtaataaggaatatcttgctctttaaaatttattaggatttttatgagtaatttttattaaaagatttctttttttgagttgtcaaaaaaaaaa

SEQ ID NO: 585 - DNA, 1893 bp, HOMO SAPIENS
aagtaagtatccccactttcagggtagcatcctctttccctagttatttcagtgcagaatcgattcacgtgtaagcctctacctcctgcacttaccccaatgtagacccccttccacagtccccctacagaagatctcccaaaacatttccaacacagaacttccattcaattcccctccgactgcccgcctccctcctccaggacagagcacgccccaggtttcgagactgaactacccccatctacggagtccacccctccctctctagaaccccctcagtgtagacgcctcctcttttcctctttcctccctactttttctagtttttctgcagccgacctccagcgtcggccactgtagctccttccttgctccactttccccagagtacacagcctgcctttccactctccgtgcagacccatcctctttcccgctcctcgctctcggacgccaccaacgctctcccgggctcttccgcgttacctacgatggaaggtcggggcgtgcgggcagctggaacccacccctgtcttggagctccgggtagctctcaaactcgaggctgcgcaccccctttcccgtcagctgagctctagagcgctggggctttctttttgatcgacttcttgaaataaaaccaactttatcattctttgggtaacagacccaaaagccgatgggacggcccgctgggctgttcccgcccctatgcccttttttgggtttccggccagaggcatgctgggagcgtcacatgcaaattgagcgtgcacccagcgttccgccctttctacgctgggccggttatcgacccggcccagtgcgcaggcgcgggaaagttgaactaataaagtttgtacgagttcagtggaggagaccgcaagttgagtggaggaggcggcggtggggccccggaccaggtgcctccatggcaggctctgaagagctggggctccgggaagacacgctgagggtcctagctgccttccttaggcgtggtgaggctgccgggtctcctgttccaactccacctagaagccctgcccaagaagagccaacagacttcctgagccgccttcgaagatgtcttccctgctccctggggcgaggagcagccccctctgagtcccctcggccttgctctctgcccatccgcccctgctatggtttagagcctggcccagctactccagacttctatgctttggtggcccagcggctggaacagctggtccaagagcagctgaaatctccgcccagcccagaattacagggtcccccatcgacagagaaggaagccatactgcggaggctggtggccctgctggaggaggaggcagaagtcattaaccagaagctggcctcggaccccgccctgcgcagcaagctggtccgcctgtcctccgactctttcgcccgcctggtggagctgttctgtagccgggatgacagctctcgcccaagccgagcatgccccgggcccccgcctccttccccggagcccctggcccgcctggccctagccatggagctgagccggcgcgtggccgggctggggggcaccctggccggactcagcgtggagcacgtgcacagcttcacgccctggatccaggcccacgggggctgggagggcatcctggctgtttcacccgtggacttgaacttgccattggactgagctctttctcagaagctgctacaagatgacacctcatgtccctgccctcttcgtgtgcttttccaagtcttcctattccactcagggctgtggggtggtggttgccctacctgtttttgccaaaaataaattgtttaaaacttttcttattaaaaacgttacaaagtaaaaaaaaaaaaaaaaaaaaaaaaaaaaaaaaaaaaaaa

SEQ ID NO: 586 - DNA, 1852 bp, HOMO SAPIENS
atgggcggctgagcggggtccaggcggagctggcgctgcaggaggagagtgtgcggcgcagtgagcgggagcgccgggccacgctggaccaggtggccacactggagaggagcctgcaggccaccgagagcgagctccgggccagccaggagaagatcagcaagatgaaggccaatgagacaaagctggagggcgacaagcggcgcctgaaggaggttctggacgcctccgagagccgcactgtcaagctggagctgcagcggcgctcgcttgagggggagctgcagcgcagccgcctgggcctcagtgaccgcgaggcccaagcccaggccctccaggatcgggtggattccctgcagagacaggtggccgacagcgaggtgaaggcagggaccctgcagctgaccgtggagcggctgaatggggccctggccaaggtggaggaaagcgagggggccctgcgggacaaggtgcggggcctgacagaggccctggcccagagcagtgccagcctcaacagcacccgggacaagaacctgcatctgcagaaggctctgaccgcctgtgaacatgaccgccaagtactccaggaacggctggatgccgcccggcaggcattatctgaggcacggaagcagagcagctccctgggcgagcaggtgcagacgttgcgaggcgaggtggctgacctggaactgcagcgggtggaggccgagggccagctacaacagctacgggaggtgctgcggcagcggcaggagggtgaggctgcagccctgaacaccgtccagaagctgcaagacgagcggcggctgctgcaggagcgcctgggaagcctgcagcgcgccctggctcagctggaagctgagaagcgagaggtggagcgctcagccctgcggctggagaaggaccgtgtagccctcaggaggacgctggacaaggtggagcgggagaagcttcgtagccatgaggacacagtgcggctgagcgcagagaagggccgcctggaccgcaccctcacgggggctgagctggagctggcagaggcgcagaggcagatccagcagctggaggcgcaggtggtggtgctggagcagagccacagcccggcccagctggaggtggatgcgcagcagcagcagctggagctgcagcaggaggtggagcggctgcgcagcgcccaggcgcagactgagcgcaccctggaggctcgggagcgggcccaccgccagagggtgtccacactgaagggccagctgcagcaggagcttcgaaggagctcagcacccttctccccaccctccggccccccagagaaatgagctcctgctggcatctggagaacacccctgtgcctgggacaggggaggacccttcttttggacagcccccccccccagagcccggtcccttgggggcctcaagctggggtgggatgaggaggcgctctgctggcagtgctgaggacgggtactccagctccaggcctggagaggcttcccagcaacacctgcagtccagcccccctcttctaggatgagccactgtagatcattaaagttcctccttgagaggctgagccgtagccaggattggggagagcccttgtctctggtcagccctggagcatgggatcgtgggaaagaggagggggaccaggcccagggcaggggtcagaggcccaggccctgacttcggcttcccagagatctctccgccttagttaagagcatgtgtcgggaaattcctcagagtgctcagagtccctgtatttttatacctttttacaatgttaactgttcagaactgttttttgtaacaaaaccttgtttttaaaaaaaaaaaaaaaaaa

SEQ ID NO: 587 - DNA, 913 bp, HOMO SAPIENS; identical to SEQ ID NO: 153

SEQ ID NO: 588 - DNA, 3312 bp, HOMO SAPIENS
aggatgtgtagggggcggggcccggcggaagcgtatataaggccgggctcggggacgcccccccctcactcgcgcgttaggaggctcgggtcgttgtggtgcgctgtcttcccgcttgcgtcagggacctgcccgactcagtggaagcggggagaggtggtgagagatgacccctgttgaggatttcattggtgtctgccacaggccgccatggcatcagatgaaggcaaactttttgttggagggctgagttttgacaccaatgagcagtcgctggagcaggtcttctcaaagtacggacagatctctgaagtggtggttgtgaaagacagggagacccagagatctcggggatttgggtttgtcacctttgagaacattgacgacgctaaggatgccatgatggccatgaatgggaagtctgtagatggacggcagatccgagtagaccaggcaggcaagtcgtcagacaaccgatcccgtgggtaccgtggtggctctgccgggggccggggcttcttccgtgggggccgaggacggggccgtgggttctctagaggaggaggggaccgaggctatggggggaaccggttcgagtccaggagtgggggctacggaggctccagagactactatagcagccggagtcagagtggtggctacagtgaccggagctcgggcgggtcctacagagacagttatgacagttacggtaagtcacactccgagggcgccacgctgctgtggcctgcggtgggagctcggttcaccttggtgccctctccaagcactttaggctggacactcagaccttgtcactgtgcttgcccagaagaggcgcatctgtcctctcagagccatttctatcgcaggacgcaaaagccaaatgagactgaccaaaaaggcaagggagagcgagggcccgctgggcagtcagctaggtgcatgtgtggccgcaggccagcctccctcggctgtggggggtggttgctccccggccgcaggccgcgccctggtctggcctctggggtgaagctgcctcttgttgcttcggtgcctttacactgtgcctgcttcttgtcctcagctacacacaacgagtaaaaacccttcctgctcaagatcgtccttccaatggctgtgtgtttaaagattgtgggagcttcgctgaacgttaatgtgtagtaaatgcacctccttgtattcccactttcgtagtcatttcggttctgatcttgtcaaacccagcctgaccgcttctgacgccgggatggcctcgttactagacttttctttttaaggaagtgctgtttttttttgagggttttcaaaacattttgaaaagcatttacttttttgaccacgagccatgagttttcaaaaaaatcgggggttgtgtgggtttttggtttttgttttagtttttggttgcgttgcctttttttttttagtggggttggccccatgaagtgggtgccccactcacttctctgagatcgaacggactgtgaatccgctctttgtcggaagctgagcaagctgtggcttttttccaactccgtgtgacgtttctgagtgtagtgtggtaggaccccggcgggtgtggcagcaactgccctggagccccagcccctgcgtccatctgtgctgtgcgccccacagtagacgtgcagacgtccctgagaggttcttgaagatgtttatttatattgtccttttttactggaagacgtacgcatactccatcgatgttgtatttgcagtggctgaggaattcttgtacgcagttttctttggctttacgaagccgattaaaagaccgtgtgaaatgaaccttgctctgacaattcccttgcattgcaccacacactccttgctgcgggctcctgcagccagacctgagcagagagagaaggtggagaagcagcgggtctgcaagccttccctggggcctgcagagctagaaagggaggcccagcagactggcgctggtcagggtaggggagccaggcgggggacgggagcgggcagctcaggcctcagggcagccctgggaggcttctggcagtggtggccagagggctggactgtgcgggcagcttagcagggacagtggacgtgcacctgacgctgacctggactgcctcagtctagaagcaggccagagagcagaggcacgtggcatcccagggcgacctcagacggccagccggttagctagttctgctgttgcttcacgagttctgagcattctctgctagcctatggaagctgcagccctcggaggacagaagtgttgtgcgcccaacagaaccctctgagacgcaagctgctcccttggctagctcatatgtggaaatagccctgtaattcgaggtaactccttccgctcgtgtccacatccctcttgttgagagctcactgaaagtcatgtgcccggggaatgttcctgtgactgttttttgtttttccttttttttttaactttgtttttgtttttttcaattaagctggaactaaagtcaggcccagccattacgctccccacgtgcagccaggtgcagcctgggcccagtcatgcctggctcatagatgaaatcccttaagcaggattgaagaccagtgaacgcccccgccttttggattttttgctcaattgaccgtcttttccagacctctttaagtcacactcttaacttagctttctctgatgtctgttgccgccattagtttttttctagagcccacactggcccacatagctccatcccatacgggtagctggctccagctgcgccaaggtgcagacccgccctgggcatgctggcctgtgacggagcctgaggtcacagccccctgactagcctgagaccttcctaggggctgtggctgtttccggggaggccgggaggggcagctgtgagccctgtggaggacgttgggagtaacgctgctttgctttggcaggttgaaggggcccggccaggactcggggaagggtggcctgagagcagcgatgacctctggggtcactgtcccaggagggacttcacctggaacaagagctggaggcagccgcttgcccaggaggcttgtcccctgaggcgcttcgccagtgaggtgcgggctcagggcctcgagtctctcctggagcacgggctgcggtgcgccggcagcttacggggcggccagtccttgcccacaacgatgtggagccctgtgaaagtcggattcgaataaagggccacgtgtgcacccagaaaaaaaaaaaaaaaaaaaaaaaaaaaaaaaaaaaaaaaaaaaaaaaaaagg

SEQ ID NO: 589 - DNA, 2464 bp, HOMO SAPIENS
ccccagggctgccaggcgtattcctgcctgggcctcctggcacaagagataaaatgaacagggttactcccagtaactggtccaggagataccagcagagagggagtaggagagaagaaacatgtcagggtgctcacaggagtagtggggggaggttttgctatttccagattcttaagccaacaaaagtgccttcatattttctgtctggaagacagaaagcccagaaggagcccagaagcaacagtttgagagaggcgctttctgcggccaagtggataagaggagcggcctgcaaccatgggacaggccctgggtatcaagagctgtgactttcaggcagcaagaaacaatgaggagcaccacaccaaggccctcagctcccggcgcctctttgtgaggagggggcagcccttcaccatcatcctgtacttccgcgctccagtccgtgcatttctgcctgccctgaagaaggtggccctcactgcacaaactggagagcagccttccaagatcaacaggacccaagccacattcccaatttccagtctgggggaccgaaagtggtggagtgcagtggtggaggagagagatgcccagtcctggaccatctctgtgaccacacctgcggacgctgtcattggccactactcgcttctgctgcaggtctcaggcaggaagcaactcctcttgggtcagttcacactgctttttaacccctggaatagagaggatgctgtgttcctgaagaatgaggctcagcgcatggagtacttgttgaaccagaatggtctcatctacctgggtacagctgactgcatccaggcagagtcctgggactttggccagttcgagggggatgtcattgacctcagcctgcgcttgctgagcaaggacaagcaggtagagaagtggagccagccggtgcacgtggcccgtgtgttgggtgccttgctgcattttctcaaggagcagagggtcctgcccaccccgcagacccaggccacccaggaaggggccttgctgaacaagcgccggggcagcgtgcccatcctgcggcagtggctcaccggccgaggccgacctgtgtatgatggccaggcctgggtgttggctgctgttgcttgcacagtgctgcgatgcctgggaatccctgcccgcgtggtgaccacgtttgcctcagcacagggcaccggtgggcgtcttctcatagatgaatactataatgaggagggacttcagaacggagaaggccagagaggcagaatctggatcttccagacttccacagagtgctggatgacgcggcctgccttgccccagggttatgatggatggcagattctgcacccaagtgctcctaatggaggtggagtcctggggtcctgtgatctggtgccggtcagagcagtcaaggaggggacgctggggctgaccccagcagtgtcagacctttttgctgccataaatgcctcatgtgtggtctggaagtgctgtgaggatgggacactggagttgactgactccaacacaaagtatgttggcaacaacatcagcaccaagggtgtgggcagtgaccgctgcgaggacatcactcagaactacaagtatcctgaagggtctcttcaggaaaaagaggtgctggagagagtcgagaaagagaaaatggaacgtgagaaagacaacggcatccgtcctcccagtctcgagactgccagtcctctgtacctgctcttgaaagcacccagctccctacccctgagaggggatgcccagatctcagtgacgctggttaatcacagtgagcaggagaaggcagtgcagctggcaattggggtccaggctgtacactacaacggtgtccttgctgccaagctctggaggaagaagctgcacctcacgctcagtgccaacctggaaaagataataaccatcggcctgttcttctccaattttgagcgaaacccacccgagaacaccttccttagactcaccgccatggcaacacactctgaatccaaccttagctgctttgctcaggaagacattgccatttgtagaccacaccttgccatcaagatgccagagaaagcagagcagtatcaacccctcacagcctcagtcagcctccagaactccctagatgcccccatggaggactgtgtgatctccatcctgggaagggggctcattcacagagagaggagctacagattccgttcagtgtggcctgaaaacaccatgtgtgccaagttccagttcacgccaacacatgtggggctccagagactcactgtggaagtggactgcaacatgttccagaacctaaccaactataaaagcgtcaccgtggtagcccctgaactatcagcttaaacttccagctctatcaccactctcctgccaacccttgttctacaatctaaaccaaacatgtgctaggaagagaaaaaaaaaaaaaaaa

SEQ ID NO: 590 - DNA, 6107 bp, HOMO SAPIENS
aaatgacgacaacggtgagggttctcgggcggggcctgggacaggcagctccggggtccgcggtttcacatcggaaacaaaacagcggctggtctggaaggaacctgagctacgagccgcggcggcagcggggcggcggggaagcgtatacctaatctgggagcctgcaagtgacaacagcctttgcggtccttagacagcttggcctggaggagaacacatgaaagaaagaacctcaagaggctttgttttctgtgaaacagtatttctatacagttgctccaatgacagagttacctgcaccgttgtcctacttccagaatgcacagatgtctgaggacaaccacctgagcaatactgtacgtagccagaatgacaatagagaacggcaggagcacaacgacagacggagccttggccaccctgagccattatctaatggacgaccccagggtaactcccggcaggtggtggagcaagatgaggaagaagatgaggagctgacattgaaatatggcgccaagcatgtgatcatgctctttgtccctgtgactctctgcatggtggtggtcgtggctaccattaagtcagtcagcttttatacccggaaggatgggcagctaatctataccccattcacagaagataccgagactgtgggccagagagccctgcactcaattctgaatgctgccatcatgatcagtgtcattgttgtcatgactatcctcctggtggttctgtataaatacaggtgctataaggtcatccatgcctggcttattatatcatctctattgttgctgttctttttttcattcatttacttgggggaagtgtttaaaacctataacgttgctgtggactacattactgttgcactcctgatctggaattttggtgtggtgggaatgatttccattcactggaaaggtccacttcgactccagcaggcatatctcattatgattagtgccctcatggccctggtgtttatcaagtacctccctgaatggactgcgtggctcatcttggctgtgatttcagtatatgatttagtggctgttttgtgtccgaaaggtccacttcgtatgctggttgaaacagctcaggagagaaatgaaacgctttttccagctctcatttactcctcaacaatggtgtggttggtgaatatggcagaaggagacccggaagctcaaaggagagtatccaaaaattccaagtataatgcagaaagcacagaaagggagtcacaagacactgttgcagagaatgatgatggcgggttcagtgaggaatgggaagcccagagggacagtcatctagggcctcatcgctctacacctgagtcacgagctgctgtccaggaactttccagcagtatcctcgctggtgaagacccagaggaaaggggagtaaaacttggattgggagatttcattttctacagtgttctggttggtaaagcctcagcaacagccagtggagactggaacacaaccatagcctgtttcgtagccatattaattggtttgtgccttacattattactccttgccattttcaagaaagcattgccagctcttccaatctccatcacctttgggcttgttttctactttgccacagattatcttgtacagccttttatggaccaattagcattccatcaattttatatctagcatatttgcggttagaatcccatggatgtttcttctttgactataacaaaatctggggaggacaaaggtgattttcctgtgtccacatctaacaaagtcaagattcccggctggacttttgcagcttccttccaagtcttcctgaccaccttgcactattggactttggaaggaggtgcctatagaaaacgattttgaacatacttcatcgcagtggactgtgtccctcggtgcagaaactaccagatttgagggacgaggtcaaggagatatgataggcccggaagttgctgtgccccatcagcagcttgacgcgtggtcacaggacgatttcactgacactgcgaactctcaggactaccgttaccaagaggttaggtgaagtggtttaaaccaaacggaactcttcatcttaaactacacgttgaaaatcaacccaataattctgtattaactgaattctgaacttttcaggaggtactgtgaggaagagcaggcaccagcagcagaatggggaatggagaggtgggcaggggttccagcttccctttgattttttgctgcagactcatcctttttaaatgagacttgttttcccctctctttgagtcaagtcaaatatgtagattgcctttggcaattcttcttctcaagcactgacactcattaccgtctgtgattgccatttcttcccaaggccagtctgaacctgaggttgctttatcctaaaagttttaacctcaggttccaaattcagtaaattttggaaacagtacagctatttctcatcaattctctatcatgttgaagtcaaatttggattttccaccaaattctgaatttgtagacatacttgtacgctcacttgccccagatgcctcctctgtcctcattcttctctcccacacaagcagtctttttctacagccagtaaggcagctctgtcgtggtagcagatggtcccattattctagggtcttactctttgtatgatgaaaagaatgtgttatgaatcggtgctgtcagccctgctgtcagaccttcttccacagcaaatgagatgtatgcccaaagacggtagaattaaagaagagtaaaatggctgttgaagcactttctgtcctggtattttgtttttgcttttgccacacagtagctcagaatttgaacaaatagccaaaagctggtggttgatgaattatgaactagttgtatcaacacaaagcaagagttggggaaagccatatttaacttggtgagctgtgggagaacctggtggcagaaggagaaccaactgccaaggggaaagagaaggggcctccagcagcgaaggggatacagtgagctaatgatgtcaaggaggagtttcaggttattctcgtcagctccacaaatgggtgctttgtggtctctgcccgcgttacctttcctctcaatgtacctttgtgtgaactgggcagtggaggtgcctgctgcagttaccatggagttcaggctctgggcagctcagtcaggcaaaacacacaaacagccatcagcctgtgtgggctcagggcacctctggacaaaggcttgtggggcataaccttctttaccacagagagcccttagctatgctgatcagaccgtaagcgtttatgagaaacttagtttcctcctgtggctgaggaggggccagctttttcttcttttgcctgctgttttctctcccaatctatgatatgatatgacctggtttggggctgtctttggtgtttagaatatttgttttctgtcccaggatatttcttataagaacctaacttcaagagtagtgtgcgagtactgatctgaatttaaattaaaattggcttatattaggcagtcacagacaggaaaaataagagctatgcaaagaaagggggatttaaagtagtaggttctatcatctcaattcatttttttccatgaaatcccttcttccaagattcattccctctctcagacatgtgctagcatgggtattatcattgagaaagcacagctacagcaaagccacctgaatagcaatttgtgattggaagcattcttgagggatccctaatctagagtaatttatttgtgtaaggatcccaaatgtgttgcacctttcatgatacatttcttctctgaagagggtacgtggggtgtgtgtatttaaatccatcctatgtattactgattgtcctgtgtagaaagatggcaattattctgtctctttctccaagtttgagccacatctcagccacattgttagacagtgtacagagaacctatctttcctttttttttttttaaaggacaggattttgctgtgttgcccaggctagacttgaactcctgggctcaagtaatccacctcagcctgagtagctgagactacagcccatcttatttctttaaatcattcatctcaggcagagaacttttccctcaaacattctttttagaattagttcagtcattcctaaaacatccaaatgctagtcttccaccatgaaaaatagattgtcactggaaagaacagtagcaatttccataaggatgtgccttcactcacacgggacaggcggtggttatagagtcgggcaaaaccagcagtagagtatgaccagccaagccaatctgcttaataaaaagatggaagacagtaaggaaggaaagtagccactaagagtctgagtctgactgggctacagaataaagggtatttatggacagaatgtcattacatgcctatgggaataccaatcatatttggaagatttgcagattttttttcagagaggaaagactcaccttcctgtttttggttctcagtaggttcgtgtgtgttcctagaatcacagctctgactccaaatgactcaatttctcaattagaaaaagtagaagctttctaagcaacttggaagaaaacagtcataagtaagcaatttgttgattttactacagaagcaacaactgaagaggcagtgtttttactttcagactccgggattcccattctgtagtctctctgcttttaaaaaccctccttttgcaatagatgcccaaacagatgatgtttattacttgttatttacgtggcctcagacagtgtatgtattctcgatataacttgtagagtgtgaaatataagtttaactaccaaataaggtctcccagggttagatgactgcgggaagcctttgatcccaacccccaaggctttgtatatttgatcatttgtgatctaaccctggaagaaaaagagctcagaaaccactatgaaaaaatttgttcagtgttttctgtgttcccgtaggttctggagtctgaggatgcaaagatgaataagataaattctcagaatgtagttataatctcttgttttctggtatatgccatctttctttaacttctctaaaatattgggtatttgtcaaataaccacttttaacagttaccattactgagggcttatacattggtgttataaaagtgacttgattcagaaatcaatccattcagtaaagtactccttctctaaatttgctgttatgtctataaggaacagtttgacctgcccttctcctcacctcctcacctgccttccaacattgaatttggaaggagacgtgaaaattggacatttggttttgcccttgggctggaaactatcatataatcataagtttgagcctagaagtgatccttgtgatcttctcacctctttaaattcccacaacacaagagattaaaaacagaggtttcagctcttcatagtgcgttgtgaaatggctggccagagtgtaccaacaaagctgtcatcgggctcacagctcagagacatctgcatgtgatcatctgcatagtcctctcctctaacgggaaacacctcagatttgcatataaaaaagcaccctggtgctgaaatgaacccctttcttgaacatcaaagctgtctcccacagccttgggcagcagggtgcctcttagtggatgtgctgggtccaccctgagccctgacatgtggtggcagcattgccagttggtctgtgtgtctgtgtagcagggacgatttcccagaaagcaattttccttttgaaatacgtaattgttgagactaggcagtttcaaagtcagctgcatatagtagcaagtacaggactgtcttgtttttggtgtccttggaggtgctggggtgagggtttcagtgggatcatttactctcacatgttgtctgccttctgcttctgtggacactgctttgtacttaattcagacagactgtgaatacaccttttttataaatacctttcaaattcttggtaagatataattttgatagctgattgcagattttctgtatttgtcagattaataaagactgcatgaatccaaaaaaaaaaaaaaaaaa

SEQ ID NO: 591 - DNA, 2217 bp, HOMO SAPIENS
ccccgccgccgccgcccttcgcgccctgggccatctccctcccacctccctccgcggagcagccagacagcgagggccccggccgggggcaggggggacgccccgtccggggcacccccccggctctgagccgcccgcggggccggcctcggcccggagcggaggaaggagtcgccgaggagcagcctgaggccccagagtctgagacgagccgccgccgcccccgccactgcggggaggagggggaggaggagcgggaggagggacgagctggtcgggagaagaggaaaaaaacttttgagacttttccgttgccgctgggagccggaggcgcggggacctcttggcgcgacgctgccccgcgaggaggcaggacttggggaccccagaccgcctccctttgccgccggggacgcttgctccctccctgccccctacacggcgtccctcaggcgcccccattccggaccagccctcgggagtcgccgacccggcctcccgcaaagacttttccccagacctcgggcgcaccccctgcacgccgccttcatccccggcctgtctcctgagcccccgcgcatcctagaccctttctcctccaggagacggatctctctccgacctgccacagatcccctattcaagaccacccaccttctggtaccagatcgcgcccatctaggttatttccgtgggatactgagacacccccggtccaagcctcccctccaccactgcgcccttctccctgaggacctcagctttccctcgaggccctcctaccttttgccgggagacccccagcccctgcaggggcggggcctccccaccacaccagccctgttcgcgctctcggcagtgccggggggcgccgcctcccccatgccgccctccgggctgcggctgctgccgctgctgctaccgctgctgtggctactggtgctgacgcctggccggccggccgcgggactatccacctgcaagactatcgacatggagctggtgaagcggaagcgcatcgaggccatccgcggccagatcctgtccaagctgcggctcgccagccccccgagccagggggaggtgccgcccggcccgctgcccgaggccgtgctcgccctgtacaacagcacccgcgaccgggtggccggggagagtgcagaaccggagcccgagcctgaggccgactactacgccaaggaggtcacccgcgtgctaatggtggaaacccacaacgaaatctatgacaagttcaagcagagtacacacagcatatatatgttcttcaacacatcagagctccgagaagcggtacctgaacccgtgttgctctcccgggcagagctgcgtctgctgaggctcaagttaaaagtggagcagcacgtggagctgtaccagaaatacagcaacaattcctggcgatacctcagcaaccggctgctggcacccagcgactcgccagagtggttatcttttgatgtcaccggagttgtgcggcagtggttgagccgtggaggggaaattgagggctttcgccttagcgcccactgctcctgtgacagcagggataacacactgcaagtggacatcaacgggttcactaccggccgccgaggtgacctggccaccattcatggcatgaaccggcctttcctgcttctcatggccaccccgctggagagggcccagcatctgcaaagctcccggcaccgccgagccctggacaccaactattgcttcagctccacggagaagaactgctgcgtgcggcagctgtacattgacttccgcaaggacctcggctggaagtggatccacgagcccaagggctaccatgccaacttctgcctcgggccctgcccctacatttggagcctggacacgcagtacagcaaggtcctggccctgtacaaccagcataacccgggcgcctcggcggcgccgtgctgcgtgccgcaggcgctggagccgctgcccatcgtgtactacgtgggccgcaagcccaaggtggagcagctgtccaacatgatcgtgcgctcctgcaagtgcagctgaggtcccgccccgccccgccccgccccggcaggcccggccccaccccgccccgcccccgctgccttgcccatgggggctgtatttaaggacacccgtgccccaagcccacctggggccccattaaagatggagagaggactgcggaaaaaaaaaaaaaaaaaa

SEQ ID NO: 592 - DNA, 2128 bp, HOMO SAPIENS
cccgctcgtctggcccgcccccctcgccctcgcaggcggtccgcgccactgcctctcagtccctgtcctgcgcccgcgcgccccgggagcctacccagcacgcgctccgcgcccactggttccctccagccgccgccgtccagccgagtccccactccggagtcgccgctgccgcggggacatggtcctctgcgttcagggacctcgtcctttgctggctgtggagcggactgggcagcggcccctgtgggccccgtccctggaactgcccaagccagtcatgcagcccttgcctgctggggccttcctcgaggaggtggcagagggtaccccagcccagacagagagtgagccaaaggtgctggacccagaggaggatctgctgtgcatagccaagaccttctcctaccttcgggaatctggctggtattggggttccattacggccagcgaggcccgacaacacctgcagaagatgccagaaggcacgttcttagtacgtgacagcacgcaccccagctacctgttcacgctgtcagtgaaaaccactcgtggccccaccaatgtacgcattgagtatgccgactccagcttccgtctggactccaactgcttgtccaggccacgcatcctggcctttccggatgtggtcagccttgtgcagcactatgtggcctcctgcactgctgatacccgaagcgacagccccgatcctgctcccaccccggccctgcctatgcctaaggaggatgcgcctagtgacccagcactgcctgctcctccaccagccactgctgtacacctaaaactggtgcagccctttgtacgcagaagcagtgcccgcagcctgcaacacctgtgccgccttgtcatcaaccgtctggtggccgacgtggactgcctgccactgccccggcgcatggccgactacctccgacagtaccccttccagctctgactgtacggggcaatctgcccaccctcacccagtcgcaccctggaggggacatcagccccagctggacttgggcccccactgtccctcctccaggcatcctggtgcctgcatacctctggcagctggcccaggaagagccagcaagagcaaggcatgggagaggggaggtgtcacacaacttggaggtaaatgcccccaggccgcatgtggcttcattatactgagccatgtgtcagaggatggggagacaggcaggaccttgtctcacctgtgggctgggcccagacctccactcgcttgcctgccctggccacctgaactgtatgggcactctcagccctggtttttcaatccccagggtcgggtaggacccctactggcagccagcctctgtttctgggaggatgacatgcagaggaactgagatcgacagtgactagtgaccccttgttgaggggtaagccaggctaggggactgcacaattatacactatttatttatttattctccttggggttggtgtcaggggcgagccaaccccacctctatgccctgagccctggtagtccagagaccccaactctgccctggcttctctggttcttccctgtggaaagcccatcctgagacatcttgctggaaccaaggcaatcctggatgtcctggtactgacccacccgtctgtgaatgtgtccactctcttctgcccccagccatatttggggaggatggacaactacaataggtaagaaaatgcagccggagcctcagtccccagcagagcctgtgtctcaccccctcacaggacagagctgtatctgcatagagctggtctcactgtggcgcaggccccggggggagtgcctgtgctgtcaggaagagggggtgctggtttgagggccgccactgcagttctgctaggtctgcttcctgcccaggaaggtgcctgcacatgagaggagagaaatacacgtctgataagacttcatgaaataataattatagcaaagaacagtttggtggtcttttctcttccactgatttttctgtaatgacattatacctttattacctctttattttattacctctataataaaatgatacctttcatgtacagagccctcaatggggccgattttcagttgtgtaaaaaaaaaaaaaaaaaa

SEQ ID NO: 593 - DNA, 3753 bp, HOMO SAPIENS
accgccgccgaacgttcccgcggcgggctccgccccccggccaatcggaccggcgctcggtgaagcccagattctctttgttccgcagccatttcaggccccggacaggaggcagtgccgcttcggccgaaggcccgagcgcccgaggcgtctgggatggtgtgggaccggcaaaccaagatggagtatgagtggaaacctgacgagcaagggcttcagcaaatcctgcagctgttgaaggagtcccagtccccagacaccaccatccagagaaccgtgcaacaaaaactggaacaacttaatcagtatccagactttaacaactacttgatttttgttcttacaaaattaaaatctgaagatgaacccacaagatcattgagtggtcttatcttgaagaataatgtgaaagcacactttcagaacttcccaaatggtgtaacagactttattaaaagtgaatgtttaaataatattggtgactcctctcctctgattagagccactgttggtattttgatcacaactatagcctccaagggagaattgcagaattggcctgacctcttaccaaaactctgtagcctgttggattctgaagattataatacctgtgagggagcatttggtgcccttcagaagatttgtgaagattctgctgagattttagacagtgatgttttagatcgtcctctcaacatcatgattcccaaatttttacagttcttcaagcatagtagtccaaaaataaggtctcacgctgttgcatgtgtcaatcagtttatcatcagtaggactcaagctctaatgttgcacattgattcttttattgagaatctctttgcattagctggtgatgaagaaccagaggtacggaaaaatgtgtgccgagcacttgtgatgttgctcgaagttcgaatggatcgcctgcttcctcacatgcataatatagttgagtacatgctacagaggactcaagatcaagatgaaaatgtggctttagaagcctgtgaattttggctaactttagctgaacagccaatatgcaaagatgtactcgtaaggcatcttcctaagttgattcctgtgttagtgaatggcatgaagtactcagacatagatattatcctacttaagggtgatgttgaagaagacgaaacgattcctgatagtgaacaggatatacggccacgttttcaccgatcgaggacggtggctcagcagcatgatgaagatggaattgaagaggaagatgatgatgatgatgaaattgatgatgatgatacaatttctgactggaatctaagaaaatgttctgctgctgccctggatgttcttgcaaatgtgtatcgtgatgaactgctgccacatattttgccccttttgaaagaattactttttcatcatgaatgggttgttaaagaatcaggcattttggttttaggagcaattgctgaaggttgcatgcagggcatgattccatacttgcctgagcttattcctcaccttattcagtgcctctctgataaaaaggctcttgtgcgttccataacatgctggactcttagccgctatgcacactgggtggtcagccagccgccagacacgtacctgaagccattaatgacagaattgctaaagcgcatcctggacagcaacaagagagtacaagaagctgcctgcagtgcctttgctaccctagaagaggaggcttgtacagaacttgttccttaccttgcttatatacttgataccctggtctttgcatttagtaaataccagcataagaacctgctcattctttacgatgccataggaacattagcagattcagtaggacatcatttaaacaaaccagaatatattcagatgctaatgcctccactgatccagaaatggaacatgttaaaggatgaagataaagatctcttccctttacttgagtgcctatcttcagttgccacagcactgcagtctggattccttccgtactgtgaacctgtgtatcagcgttgtgtaaacctagtacagaagactcttgcacaagccatgctaaacaatgctcaaccagatcaatatgaagctccagataaagattttatgatagtggctcttgatttactgagtggcctggctgaaggacttggaggcaacattgaacagctggtagcccgaagtaacatcctgacactaatgtatcagtgcatgcaggataaaatgccagaagttcgacagagttcttttgccctgttaggtgacctcacaaaagcttgctttcagcatgttaagccttgtatagctgatttcatgccaatattgggaaccaacctaaatccagaattcatttcagtctgcaacaatgccacatgggcaattggagaaatctccattcaaatgggtatagagatgcagccttatattcctatggtgttgcaccagcttgtagaaatcattaacagacccaacacaccaaagacgttgttagagaatacagcaataacaattggtcgtcttggttacgtttgtcctcaagaggtggcccccatgctacagcagtttataagaccctggtgcacctctctgagaaacataagagacaatgaggaaaaggattcagcattccgtggaatttgtaccatgatcagtgtgaatcccagtggcgtaatccaagattttatatttttttgtgatgccgttgcatcatggattaacccaaaagatgatctcagagacatgttctgtaagatccttcatggatttaaaaatcaagttggcgatgaaaattggaggcgtttctctgaccagtttcctcttcccttaaaagagcgtcttgcagctttttatggtgtttaatctaatacacttaagctgcagtcccaaaattaggggtccttcagtcttggagactataagggagcctctgcacccagggaggtgttgccgtcactgtattaagtcgatgttgggaaacgttttaacatctggagcctttgtgggtggaaatatgtctccagttacaactccgcagtggatgtgaagaagcaaaaaaaaaaaaatctattcagtctactcacaaaacagtacattgtggaatattatggggaattgtaccaaaacaagaaccatataaatgatgcctagggacaagaaagaggaacaattctatagcgcacaataaaggaaacctaagaatgggagttacaaatagtaaagaagcttttttttttttttaatttaaagtttttttatgtaagttttcccacatgatggggccttgttttgcatgttgatgaagaactacacaaagaaaactaatatagttaaaagtcagcttgccttcccgtagtagaagcaggttcttggaagttacaatttaaggtaccccaaaaaagttggaaataaaacaaaacaaacataaacaatgaagcaccctgtgaaatgccaaatgagtcactccttttaccttttttggggtgggcagggagggaggaataaatggggttgggcatatcaaactaaagatgacatcttaattttgcattgaacattaatgtagcggatataatttgatgattatacttcattagatttaatttctaggccaagatgttactttttaaagtgcagtttaaggttcaggcatgcattctggctcatagtggttgaaagtaatttaaattagtgggaaagtagcatgcttgcatcacatagagtgagattggtattcatttacctatgttgcgccagtttgtg

SEQ ID NO: 594 - DNA, 4248 bp, HOMO SAPIENS
aaccgaaggaggccccgcccccggaggcaccgcctcgcctctttccgccagcgcccgcaggacccggatgagagcgcacgcttcggggtctccgggaagtcgcggcgccttcggatgtggcggatgcggccgtgagccggcgggggaggtgctgctgctgcctccactgtactcagacccaggtagcacaggattgtccatcctccagcagctcagtgcaacggtgtgaactcagcctgtttcagagcctccacaccatgacctccaagaagctggtgaactcggtggctggctgtgctgatgacgctcttgctggcctggtggcctgcaaccccaacctgcagctcctgcagggccaccgcgtggccctccgttctgacctggacagcctcaagggccgggtggcactgctgtcgggtgggggctctggccatgagcctgcccatgctggtttcatagggaaggggatgctgactggggtcatcgcgggagctgtgttcacctccccggcagtgggcagcatcctggcagccatcagggccgtggcccaggccggcacagtggggacgctccttatcgtgaagaactacactggggatcggctcaacttcggcctggcccgggagcaggcccgggctgaaggcatcccggtggagatggtggtgattggggacgacagcgccttcactgtcctgaagaaggcaggccggcgggggctgtgcggcacggtgcttatacacaaggtggcaggtgctctggctgaggctggtgtggggctggaggagatcgcaaagcaggtgaacgtggtcgccaaggccatgggtaccctgggggtgagcttatcctcctgcagcgtccctggttccaaacccaccttcgagctctcagccgacgaggtggagctgggcctggggatccacggggaagctggtgtgcgccggataaagatggcaaccgccgatgagattgtgaaactcatgctcgaccacatgacaaacaccaccaacgcgtcccatgtgcctgtgcagcccggctcctcagttgtgatgatggtcaacaacctgggtggcctgtcattcctggaactgggcatcatagccgacgctaccgtccgctccctggagggccgcggggtgaagattgcccgtgccctggtgggcaccttcatgtcagcactggagatgcctggcatttctctcaccctcctgctggtggatgagcctctcctgaaactgatagatgctgaaaccactgcagcagcctggcctaacgtggctgcagtctccattactgggcggaagcggagccgggtagcccctgccgagccccaggaggcccctgattccactgctgcaggaggctcagcctcgaagcggatggcgctggtgctggaacgggtgtgcagcactctcctgggcctggaggaacacctgaatgccctggaccgggctgctggtgacggcgactgtggcaccacccacagccgtgcggccagagcaatccaggagtggctgaaggagggcccaccccctgccagccctgcccagctgctctccaagttgtctgtcctgctcctggagaagatgggaggctcatctggggcgctctatggcctgttcctgactgcggctgcacagcccctgaaggccaagaccagcctcccagcctggtctgctgccatggatgccggcctggaagccatgcagaagtatggcaaggctgctccaggggacaggactatgctggattctctgtgggcagcggggcaggagctccaagcctggaagagcccaggagctgatctgttacaagtcctgaccaaagcagtcaagagtgccgaagctgcagccgaggccaccaagaatatggaagctggagccggaagagccagttatatcagctcagcacggctggagcagccagaccccggggcggtggcagctgctgccatcctccgggccatcttggaggtcttgcagagctagggtgtgtgactgcctcccttggcctcagctcctctcactgctgtgctgaggtggcctttgtcacttccttctgccttccaaccctcaccttcccccggcctggccccattggcccaccctctaagttgagcaggaaatcctccaccaagcttccagaactacagacagcacccagagtgagctggagtgggtccccatgcctctccagcatgccctttccctttgcaggagggtggagtccctgggtcatgccctcccctgccagctctgggcttcagagataaggcattttccttgtgcagcctttacctggcaatcctaatttggttttaagactccctgtgaaatgctttccgcaccttaaccccagtgagcgtgaaaaagaaagttaataaactataatacatggaagcaagaaagacactgcctcctctgagggaccttttcccaagcatgtaaacaagggggcccacagccctggctgcaggcatcatgacccatcttctaccaggcagatctttattacctgagcccctaaggcagtgtctcctcagctgggctgcttccactgagacccccgacccatcccctttccagtacacacacctgatgcatgtaagaatggtagaggggcttttcttagcattgaattaataattcagtggctcctcgggagtcgaatgggcatttgggacaccagaaggaaaagaaatcatcatagtctaaggttcagttgtagatcaaaaaatgcagccaggccgggcacggtggctcacacctgcaatcccagcactttgggaggccaaggcaggcggatcccttacactcaggagttcaagaccagtctgggcaacatggtaaaaccctgtctctaccaaaaaatacaaaattagccaggcatagtagtgtgtgcctatagtcctaacttgggaggctgagttgggaggatggcttgggcccaggaggtcgaggctgcggtgagccataagcatgccactatactccagcctgggcaacaaagcgagaccctgtctcaaaaaaaaaaaaaaaaaaaaaagaaactgcagccaagccagcccctaggtctctttctagagcgatcactgatggcaccagggtgagcaggggcactgtatgcatgtggagacaaacagcacatgcctggcacacatgtagggtagggagtggttaaaggcactggctgtcgactcatacacatgatctgaaatctgattctgctttaacccggctacaggagctaaggcctattttttagccctttgggatctgtaaaatcagaatggtacccacctcatggggacatgaaaggattcaaatgaattgatgaagatgggccataaagcccagcacagtccaagtgctcactcactgagagttacggttatcacaggggttgggcccccagcccctcccaggtcatctgctctaccactagctggtaggaaagagcctcctgccctcccaacccccgtcacctacttggcccaaatttggctgcaggctccccgagtgcctgggcttctctacccagggtcctgtctgtcggctgcaccatacgtccctgaccacaaggcatccacgtgcacaggagtatgcgcccagcagctgggaaggaggctgacctcagacggtggcctgtggatcccagctctgtcatttcctggctgggtgacctcaacctagtcaccctttttgagtcttgttttctcagattatgaaataggaaaaatttccttcctcgtgagataagcacgtgccattagctattaaggacacgcacataaatgagctgcatgtgaatccacacatgccattccatgaagacagaggatcatgtggatctttggtgccttccggttggcccctccctaggtctgtgagggtcagacctgtcctgaggcttttacaaattggcccagaactcatttaaccacagcatcatttcattagagggctgttattagagactgaatgtttgtgtcccccccaaattcctgtgttgaaaggctcacccccactatggtagtgttaggacgtggggcctttgggaggtgatggggttatgagggtggagccccagagagctctcacgccctttccaccatgtgaggttatggtgagaagatggtctctgaggaagctggcccttgccacacaccacatttgccagcgccttcatcttggatgtctatagcctccagaactgtgagaaataaacacttgttgtttaagccaaaaaaaa

SEQ ID NO: 595 - DNA, 4083 bp, HOMO SAPIENS
actacttgcggccgaagcgccgcccctggaggccgttgggccggcctgcgccctggggctcgcagtggtttgtttgcgctgtggatggagtggcggtgcggtcccctgtggagcgcaaacaaggcgcttggttggcgcgggcgcctggctgccttcctcgtggtggggccttcggagcaatcgtcctggttctggcgatggttgagacgcctcgattgcggcgtgtaacgaacaccttccaccatgaccacctcagcaagttcccacttaaataaaggcatcaagcaggtgtacatgtccctgcctcagggtgagaaagtccaggccatgtatatctggatcgatggtactggagaaggactgcgctgcaagacccggaccctggacagtgagcccaagtgtgtggaagagttgcctgagtggaatttcgatggctctagtactttacagtctgagggttccaacagtgacatgtatctcgtgcctgctgccatgtttcgggaccccttccgtaaggaccctaacaagctggtgttatgtgaagttttcaagtacaatcgaaggcctgcagagaccaatttgaggcacacctgtaaacggataatggacatggtgagcaaccagcacccctggtttggcatggagcaggagtataccctcatggggacagatgggcacccctttggttggccttccaacggcttcccagggccccagggtccatattactgtggtgtgggagcagacagagcctatggcagggacatcgtggaggcccattaccgggcctgcttgtatgctggagtcaagattgcggggactaatgccgaggtcatgcctgcccagtgggaatttcagattggaccttgtgaaggaatcagcatgggagatcatctctgggtggcccgtttcatcttgcatcgtgtgtgtgaagactttggagtgatagcaacctttgatcctaagcccattcctgggaactggaatggtgcaggctgccataccaacttcagcaccaaggccatgcgggaggagaatggtctgaagtacatcgaggaggccattgagaaactaagcaagcggcaccagtaccacatccgtgcctatgatcccaagggaggcctggacaatgcccgacgtctaactggattccatgaaacctccaacatcaacgacttttctgctggtgtagccaatcgtagcgccagcatacgcattccccggactgttggccaggagaagaagggttactttgaagatcgtcgcccctctgccaactgcgaccccttttcggtgacagaagccctcatccgcacgtgtcttctcaatgaaaccggcgatgagcccttccagtacaaaaattaagtggactagacctccagctgttgagcccctcctagttcttcatcccactccaactcttccccctctcccagttgtcccgattgtaactcaaagggtggaatatcaaggtcgtttttttcattccatgtgcccagttaatcttgctttctttgtttggctgggatagaggggtcaagttattaatttcttcacacctaccctcctttttttccctatcactgaagctttttagtgcattagtggggaggagggtggggagacataaccactgcttccatttaatggggtgcacctgtccaataggcgtagctatccggacagagcacgtttgcagaagggggtctcttcttccaggtagctgaaaggggaagacctgacgtactctggttaggttaggacttgccctcgtggtggaaacttttcttaaaaagttataaccaacttttctattaaaagtgggaattaggagagaaggtaggggttgggaatcagagagaatggctttggtctcttgcttgtgggactagcctggcttgggactaaatgccctgctctgaacacgaagcttagtataaactgatggatatccctaccttgaaagaagaaaaggttcttactgcttggtccttgatttatcacacaaagcagaatagtatttttatatttaaatgtaaagacaaaaaactatatgtatggttttgtggattatgtgtgttttgctaaaggaaaaaaccatccaggtcacggggcaccaaatttgagacaaatagtcggattagaaataaagcatctcattttgagtagagagcaagggaagtggttcttagatggtgatctgggattaggccctcaagacccttttgggtttctgccctgcccaccctctggagaaggtgggcactggattagttaacagacaacacgttactagcagtcacttgatctccgtggctttggtttaaaagacacacttgtccacataggtttagagataagagttggctggtcaacttgagcatgttactgacagagggggtattggggttattttctggtaggaatagcatgtcactaaagcaggccttttgatattaaattttttaaaaagcaaaattatagaagtttagattttaatcaaatttgtagggtttctaggtaatttttacagaattgcttgtttgcttcaactgtctcctacctctgctcttggaggagatggggacagggctggagtcaaaacacttgtaattttgtatcttgatgtctttgttaagactgctgaagaattattttttttcttttataataaggaataaaccccacctttattccttcatttcatctaccattttctggttcttgtgttggctgtggcaggccagctgtggttttcttttgccatgacaacttctaattgccatgtacagtatgttcaaagtcaaataactcctcattgtaaacaaactgtgtaactgcccaaagcagcacttataaatcagcctaacataagatctctctgatgtgtttgtgattctttcaaatccctatgtgccattatatttctttatttcctaaaacaggcaaaataagctcaagtttatgtactctgagtttttaaaacactggagtgatgttgctgaccagccgtttcctgtacctctctaagttgggtatttgggacttaagggattaagtttttcacctagacttagttacacacaatcttggcatttcctagcctagaggtttgtagcagggtacaagccccactcctcccccttcctttgctcccctgagtttggttttggcttaccataacattgttttgaccattcctagcctaatacaatagcctaacataatgtaagattaactggctttacgatttctattctctgctctcagtgataagaaacaaatattagctaccctgctaccctggttgaagccttccaaggctggctatgccctaggcatgggctcatccttgggtgtatcttgccttgcaggaagaccagtggaccgattgtgattctcaaaagctctgtgttgtcacctgtgcccttgccccttgctcttatcttggtccgtgtatctgggagttcttccaccttatcttggccaattcctaccttcgttcattcctcatgaggttgggtaaaagctccctccggctcccatgatgctgtgcatatacctagcaaaaagcaattattggacacattggagtgcaatattattaatagcattaatactactaataatgtgggcaatagtgattgtttttaaaaggcagtatactcttaccagtgcgaggtagctggggcctgtgatagtttttagagataagttcttcaggcaactgtgtattttacactagtcaagtaatcctagatatccgtggtttttcttaagaaagttggctcgtaatatgatttaatattcaaagtagagtcatctacctattagcttgctggcgtggtcctagtttatgcctgtttcagcatgattgttgagtaccctgtttcatccttagcattttcttgattttgttgttaaatgatgtatacccttatttccattgaatctgtgcttccacccccccaactgaagttgtcttccctttgcttggccacccttacagcctcttggatggtgtatcctacagtgtaagcactaaactgaagaggcagtgacctgaaaaaaaaaaaaaaaaaa

SEQ ID NO: 596 - DNA, 2106 bp, HOMO SAPIENS
gcgcgatggcggcggctcctttaggcagctgaaaggggatttaggcccggaagatccgagtccatccgcggcggggagagggcaagcgggaccggtaggggccggagcagcggcggcggcgctcggactgtcccatccgccccgtattgaggcgctgggagcggcggggcgacaggaaagcgatggtgaaagcggggccgtgaggggggcggagccgggagccggacccgcagtagcggcagcagcggcgccgcctcccagagttcagacccaggaagcggccgggagggcaggagcgaatcgggccgccgccgccatggagctgagagtcgggaacaggtaccggctgggccggaagatcggcagcggctccttcggagacatctatctcggtacggacattgctgcaggagaagaggttgccatcaagcttgaatgtgtcaaaaccaaacaccctcagctccacattgagagcaaaatctacaagatgatgcagggaggagtgggcatccccaccatcagatggtgcggggcagagggggactacaacgtcatggtgatggagctgctggggccaagcctggaggacctcttcaacttctgctccaggaaattcagcctcaaaaccgtcctgctgcttgctgaccaaatgatcagtcgcatcgaatacattcattcaaagaacttcatccaccgggatgtgaagccagacaacttcctcatgggcctggggaagaagggcaacctggtgtacatcatcgacttcgggctggccaagaagtaccgggatgcacgcacccaccagcacatcccctatcgtgagaacaagaacctcacggggacggcgcggtacgcctccatcaacacgcaccttggaattgaacaatcccgaagagatgacttggagtctctgggctacgtgctaatgtacttcaacctgggctctctcccctggcaggggctgaaggctgccaccaagagacagaaatacgaaaggattagcgagaagaaaatgtccacccccatcgaagtgttgtgtaaaggctacccttccgaatttgccacatacctgaatttctgccgttccttgcgttttgacgacaagcctgactactcgtacctgcggcagcttttccggaatctgttccatcgccagggcttctcctatgactacgtgttcgactggaacatgctcaaatttggtgccagccgggccgccgatgacgccgagcgggagcgcagggaccgagaggagcggctgagacactcgcggaacccggctacccgcggcctcccttccacagcctccggccgcctgcgggggacgcaggaagtggctccccccacacccctcacccctacctcacacacggctaacacctccccccggcccgtctccggcatggagagagagcggaaagtgagtatgcggctgcaccgcggggcccccgtcaacatctcctcgtccgacctcacaggccgacaagatacctctcgcatgtccacctcacagaatagcattcctttcgaacaccacggcaagtagctgctcgtctcccatcggaaggcagcactggattcctggtcgggtggcttccagtggtcttcagtctgtcgtgcaccgatgagaactctccttattgctgtgaagggcagacaatgcatggctgatctactctgttaccaatggctttactagtgacacgtcccccggtctaggatcgaaatgttaacaccgggagctctccaggccactcacccagcgacgctcgtgggggaaacatactaaacggacagactccaagagctgccaccgctggggctgcactgcggccccccacgtgaactcggttgtaacggggctgggaagaaaagcagagagagaattgcagagaatcagactccttttccagggcctcagctccctccagtggtggccgccctgtactccctgacgattccactgtaactaccaatcttctacttggttaagacagttttgtatcattttgctaaaaattattggcttaaatctgtgtaaagaaaaaaaaaaaaaaaaaaaaaaaaaaaaaaaaaaaaaaaaaaaaaaaaaaaaaaaaaaaaaaa

SEQ ID NO: 597 - DNA, 4355 bp, HOMO SAPIENS; identical to SEQ ID NO: 154

SEQ ID NO: 598 - DNA, 3246 bp, HOMO SAPIENS
cgccgtttgggccgggaagcgatgtagtagctgccaggctgtcccccgccctgcccggcccgagccccgcgggccgccgccgccaccgccgccatgaagaagcagttcaaccgcatgaagcagctggctaaccagaccgtgggcagagctgagaaaacagaagtccttagtgaagatctattacagattgagagacgcctggacacggtgcggtcaatatgccaccattcccataagcgcttggtggcatgtttccagggccagcatggcaccgatgccgagaggagacacaaaaaactgcctctgacagctcttgctcaaaatatgcaagaagcatcgactcagctggaagactctctcctggggaagatgctggagacgtgtggagatgctgagaatcagctggctctcgagctctcccagcacgaagtctttgttgagaaggagatcgtggaccctctgtacggcatagctgaggtggagattcccaacatccagaagcagaggaagcagcttgcaagattggtgttagactgggattcagtcagagccaggtggaaccaagctcacaaatcctcaggaaccaactttcaggggcttccatcaaaaatagatactctaaaggaagagatggatgaagctggaaataaagtagaacagtgcaaggatcaacttgcagcagacatgtacaactttatggccaaagaaggggagtatggcaaattctttgttacgttattagaagcccaagcagattaccatagaaaagcattagcagtcttagaaaagaccctccccgaaatgcgagcccatcaagataagtgggcggaaaaaccagcctttgggactcccctagaagaacacctgaagaggagcgggcgcgagattgcgctgcccattgaagcctgtgtcatgctgcttctggagacaggcatgaaggaggagggccttttccgaattggggctggggcctccaagttaaagaagctgaaagctgctttggactgttctacttctcacctggatgagttctattcagacccccatgctgtagcaggtgctttaaaatcctatttacgggaattgcctgaacctttgatgacttttaatctgtatgaagaatggacacaagttgcaagtgtgcaggatcaagacaaaaaacttcaagacttgtggagaacatgtcagaagttgccaccacaaaattttgttaactttagatatttgatcaagttccttgcaaagcttgctcagaccagcgatgtgaataaaatgactcccagcaacattgcgattgtgttaggccctaacttgttatgggccagaaatgaaggaacacttgctgaaatggcagcagccacatccgtccatgtggttgcagtgattgaacccatcattcagcatgccgactggttcttccctgaagaggtggaatttaatgtatcagaagcatttgtacctctcaccaccccgagttctaatcactcattccacactggaaacgactctgactcggggaccctggagaggaagcggcctgctagcatggcggtgatggaaggagacttggtgaagaaggaaagtcctcccaaaccgaaggaccctgtatctgcagctgtgccagcaccagggagaaacaacagtcagatagcatctggccaaaatcagccccaggcagctgctggctcccaccagctctccatgggccaacctcacaatgctgcagggcccagcccgcatacactgcgccgagctgttaaaaaacccgctccagcacccccgaaaccgggcaacccacctcctggccaccccgggggccagagttcttcaggaacatctcagcatccacccagtctgtcaccaaagccacccacccgaagcccctctcctcccacccagcacacgggccagcctccaggccagccctccgccccctcccagctctcagcaccccggaggtactccagcagcttgtctccaatccaagctcccaatcacccaccgccgcagccccctacgcaggccacgccactgatgcacaccaaacccaatagccagggccctcccaaccccatggcattgcccagtgagcatggacttgagcagccatctcacacccctccccagactccaacgccccccagtactccgcccctaggaaaacagaaccccagtctgccagctcctcagaccctggcagggggtaaccctgaaactgcacagccacatgctggaaccttaccgagaccgagaccagtaccaaagccaaggaaccggcccagcgtgcccccacccccccaacctcctggtgtccactcagctggggacagcagcctcaccaacacagcaccaacagcttccaagatagtaacagactccaattccagggtttcagaaccgcatcgcagcatctttcctgaaatgcactcagactcagccagcaaagacgtgcctggccgcatcctgctggatatagacaatgataccgagagcactgccctgtgaagaaagccctttcccagccctccaccacttccaccctggcgagtggagcaggggcaggcgaacctctttctttgcagaccgaacagtgaaaagctttcagtggaggacaaaggagggcctcactgtgcgggacctggccttctgcacggcccaaggagaacctggaggccaccactaaagctgaatgacctgtgtcttgaagaagttggctttctttacatgggaaggaaatcatgccaaaaaaatccaaaacaaagaagtacctggagtggagagagtattcctgctgaaacgcgcataggaagcttttgtccctgctgttaatgcgggcagcacctacagcaacttggaatgagtaagaagcagtgcgttaactatctatttaataaaatgcgctcattatgcaagtcgcctactctctgctacctggacgttcattcttatgtattaggagggaggctgcgctccttcagacttgctgcagaatcattttgtatcatgtatggtctgtgtctccccagtcccctcagaaccatgcccatggatggtgactgctggctctgtcacctcatcaaactggatgtgacccatgccgcctcgttggattgtcggaatgtagacagaaatgtactgttcttttttttttttttaaacaatgtaattgctacttgataaggaccgaacattattctagtttcatgtttaatttgaattaaatatattctgtggtttatatgaaaa

SEQ ID NO: 599 - DNA, 1462 bp, HOMO SAPIENS
ggccggctagagccgggggctgggcggggaccgggcttgtcggtgaagcggcagtggcggcggcggcggcggctcggcaggcgggttcaggcttcgggggccagccgccgccatgatcctgctggaggtgaacaaccgcatcatcgaggagacgctcgcgctcaagttcgagaacgcggccgccggaaacaaaccggaagcagtagaagtaacatttgcagatttcgatggggtcctctatcatatttcaaatcctaatggagacaaaacaaaagtgatggtcagtatttctttgaaattctacaaggaacttcaggcacatggtgctgatgagttattaaagagggtgtacgggagtttcttggtaaatccagaatcaggatacaatgtctctttgctatatgaccttgaaaatcttccggcatccaaggattccattgtgcatcaagctggcatgttgaagcgaaattgttttgcctctgtctttgaaaaatacttccaattccaagaagagggcaaggaaggagagaacagggcagttatccattatagggatgatgagaccatgtatgttgagtctaaaaaggacagagtcacagtagtcttcagcacagtgtttaaggatgacgacgatgtggtcattggaaaggtgttcatgcaggagttcaaagaaggacgcagagccagccacacagccccacaggtcctctttagccacagggaacctcctctggagctgaaagacacagacgccgctgtgggtgacaacattggctacattacctttgtgctgttccctcgtcacaccaatgccagtgctcgagacaacaccatcaacctgatccacacgttccgggactacctgcactaccacatcaagtgctctaaggcctatattcacacacgtatgcgggcgaaaacgtctgacttcctcaaggtgctgaaccgcgcacgcccagatgccgagaaaaaagaaatgaaaacaatcacggggaagacgttttcatcccgctaatcttgggaataagaggaggaagcggctggcaactgaaggctggaacacttgctactggataatcgtagcttttaatgttgcgcctcttcaggttcttaagggattctccgttttggttccattttgtacacgtttggaaaataatctgcagaaacgagctgtgcttgcaaagacttcatagttcccaagaattaaaaaaaaaaaaaaaagaattccacttgatcaacttaattccttttctttatcttccctccctcacttcccttttctcccaccctcttttccaagctgtttcgctttgcaatatattactggtaatgagttgcaggataatgcagtcataacttgttttctcctaagtatttgagttcaaaactcctgtatctaaagaaatacggttggggtcattaataaagaaaatctttctatcttaaaaaaaaaaaaaaa

SEQ ID NO: 600 - DNA, 2105 bp, HOMO SAPIENS
ggagcgcgcgctctgggcgccgggacgacactccagccccgggggacccgccgcccagctcccgagggtgcggcagcctctggccactcagccggggccgagagggagctgccgggcgggcaggcgccgcaggcacccggcgggcagggcggggcagggcaagacggccgcctccgcaagtgccacccggcccacccggttctctcccttctgcctgggacgtcagcggacggggcgctcgcgggccggggctgtatggggctcccgcgcgggtcgttcttctggctgctgctcctgctcacggctgcctgctcggggctcctctttgccctgtacttctcggcggtgcagcggtacccggggccagcggccggagccagggacaccacatcatttgaagcattctttcaatccaaggcatcgaattcttggacaggaaagggccaggcctgccgacacctgcttcacctggccattcagcggcacccccacttccgtggcctgttcaatctctccattccagtgctgctgtggggggacctcttcaccccagcgctctgggaccgcctgagccaacacaaagccccgtatggctggcgggggctctctcaccaagtcatcgcctccaccctgagccttctgaacggctcagagagtgccaagctgtttgccccgcccagggacacccctccaaagtgtatccggtgtgccgtggtgggcaacggaggcattctgaatgggtcccgccagggtcccaacatcgatgcccatgactatgtattcagactcaatggagctgtgatcaaaggcttcgagcgcgatgtgggcaccaagacttccttctatggtttcactgtgaacacgatgaagaactccctcgtctcctactggaatctgggcttcacctccgtgccacaaggacaggacctgcagtatatcttcatcccctcagacatccgcgactatgtgatgctgagatcggccattctgggcgtgcctgtccctgagggcctagataaaggggacaggccgcacgcctattttggaccagaagcctctgccagtaaattcaagctgctacatccggacttcatcagctacctgacagaaaggttcttgaaatcaaagttgattaacacacattttggagacctatatatgcctagtaccggggctctcatgctgctgacagctttgcatacctgtgaccaggtcagtgcctatggattcatcacaagcaactactggaaattttccgaccactatttcgaacgaaaaatgaagccattgatattttatgcaaaccacgatctgtccctggaagctgccctgtggagggacctgcacaaggccggcatccttcagctgtaccagcgctgaccccaatgcactgagccctttgcttcttcaagagttgcggccctgatcctctcaagtggccaaaagcttttttaacttttcaatcttcaccttcccttgccaacagagggcactggggtgaattcaagattttcatcgaggtctgttcaatataggacaccccagcttgtccttggctcatccaagaactcttctgtatctaaaacaatacatctcaatcttggccaagggaaaatggactgctttgctggattggcactgagcaactttaggaaatgtcggtggagtgttcagcaagatcagacagcagtccaggtcaaaggcaaacacacacgctccagcccaaatcctcctggtggcacatcctaccccagatgctaaagtgattcaaggactccaggacacctcttaagagcctttctaagaacatgataggcttacttctgctccataataaagtgggagaaaaaagccagaatataacttaagactagataactgcgtacatgatggaccatttttttttttttggctgggtagagaaatcatataaaacgcaggctgtttagcatggagatgactctcagaacactgggagggtctggcacttgatgggggttagttgcttggcagcctgcctgccactgagggaagtcccattagagatgtatcaccaccttgtcaccaacaggatgatgtcaccaggtaataaaccttcatcctca

SEQ ID NO: 601 - DNA, 3789 bp, HOMO SAPIENS
tgtgtttcggtgtgtaacgcataaaacttcttgttccacgctccgcggtgttggggattttctactgcatctcgacagcatctcgggtaacaaccgagcccctcctcgcagcgttaattatagaaaatgccaagtaggaaatttgccgatggtgaagtggtaagaggtcgatggcctgggagttcactttattatgaagtagaaattctgagccacgacagcacctcccagctttacactgtgaagtataaagatggaacagagcttgaattgaaagagaatgatattaagcctttaacttcctttaggcaaaggaaaggtggctcaacttccagttccccttccagacgccgagggagtcgatcaaggtcacgctcccgatcccctggtcgaccacctaaaagtgcccgccgatctgcttctgcttcccaccaggccgacattaaggaagcaaggagggaagtggaagttaaattgactccgctgattctgaagccatttggaaatagcatcagcagatataatggggagcctgagcatattgagagaaatgacgcacctcataaaaatacacaggaaaaattcagtttgtcacaagaaagcagttacatagcaacacagtatagccttcgtccaagaagagaagaagtcaaattaaaagaaatagattctaaggaagaaaaatacgttgcaaaagaactggcagtgagaacctttgaagtgacccccatccgggcaaaggacttggagtttggaggagtacctggtgtgtttctcatcatgtttggcctgcctgtgttcctcttcctgttgctgttgatgtgtaaacagaaagatcccagtcttctgaatttccctcctcctttgccagctttgtatgagttatgggaaaccagagtatttggggtctacctcctgtggtttttgattcaagtcctgttctacctactgccaattggaaaggttgtagaaggaacgcctcttattgatggaagaagactcaagtatagattaaatggattctatgcttttatcctgacatctgcagtcatcggaacatctctcttccagggcgtagagtttcattacgtgtacagtcattttcttcagtttgcacttgcggccactgttttttgtgtggtcttgagtgtgtatctctacatgcgctctttgaaagcgccccggaatgacctgtcgcctgccagctctggaaatgctgtctatgatttcttcattggccgtgaattaaaccctcgaattggtacttttgatctcaaatacttttgtgaattgcgccccggattgattggatgggtggttattaacttggtgatgcttttggctgaaatgaaaatacaggaccgcgctgttccatccttggccatgattttagttaatagtttccagcttctctatgtggtggatgctctctggaatgaggaagcgttgttgacgaccatggacatcatccacgatggatttggattcatgctggcttttggagacttggtgtgggttccctttatttacagcttccaagccttttatttagtcagtcatccaaatgaagtgtcttggccaatggcttctctaattattgttctgaaactttgtggttatgtaatcttccgaggtgcaaattctcagaaaaatgcattccggaaaaatcccagtgatccaaagcttgcacatttaaaaaccattcatacttcaacgggaaaaaatcttctagtttctggatggtggggctttgttcgccaccccaattacttgggtgatctcatcatggccttggcgtggtccctcccatgtggttttaaccacattctgccttatttctacataatttatttcaccatgttgcttgtccaccgagaagctcgtgacgagtaccactgtaagaagaaatacggcgtggcttgggaaaagtactgtcagcgtgtgccctaccgtatatttccatacatctactaatgctcttctggcttttctacaaaatactcctgcaattccagctgccatttgcaaaaacaaggaaaaaaatccgaaactttcttttgttgcactgacagggtctgtacttttttttttctttttgagtcaggactatggagccgagtagttgatcttttaatatagccgtgtttacttgtattaacttacagttaacataggaaaaatacaagtaaggatgtgagaatttgcattttaatgggaaattttcaacccttaatctgaaaacagaagacagtcttaatataaatgtactgtgaagaatgctattgatgtttatggtttctgattacttttcaaattttgatgtttttttgccagttggcttttcttaaatgaaaacactgttccatttaaagtacatttatgttttattcagtaagagaatagaattttcatttgtttttctttaaatcctttactaattatataatttgaaagcaaaaagaagggcctatattaaatgctgaaagtgaaaagtgatgacattattagcagacactgcttaaaggagaccatttgtagcagttggcttaacctcaacttctaaaactacattgaaaatgtaaatacatagcttagttttttgtaatatatggtgacttcagatttttttgtacagtattttgaatgtgagatgattgtcaggactaactgtctttttaacaaaacattttcagtattttaaataaaattttgtaaagtaatgtgaattaaaaattttggaacaattagaattcattcactattgtatagaagatgctgttaaaacataggaagggtatttttcttgatccaaagtttgtgaatttggctttgctacctcaattgcaggtgtttgtttgcctttataaactgttgcaaatagaaaaaaaatagaataagtatatatttttggagtaacatcaatatttaaacatttttacacagatcggtgtttgaaaatttgccatttcaggctaatatttttatatatttttgactttttaaaagttcatcagtgtttttgctactgttaagcttatgcagtttatactgtattttttatgtatcctttatatttaccaaacctgactccctgtaaaggagtgctgtcttaaaaacaactgaaggggttaaagtcgtttcttttagtttaatagatgtgcataaggtagctttagcaattaaattctagtgaagttgatatagtctcatttttaattgtcctgtaatggaacagtagcaaattcactaaacttttgtgttcagagttaaattgttctcagtactttcaatgtaggggaatgtaataaacatagtgtgtatgtttgggttttaattacacattttatatatgagccatttagatatgcagtgttaattctatactgcatttgaagtgtatgtaacttagcttatgttaatgcagtcatgaagttggtttgctccagcatccggtagtctttaaacattcttttagtgaaattgtcattgttttatcagtgctaatgtgtgcaagcagtttttttattttgcttttctcctggcatcagaaagtggtggcgttttctgtactggattgcaccaaggaagcttttggggaggaaggaaggacattaaattctttccctggtaatgaaaagagccctttatcaatacagtgctgcaatttctggatatcagctacactttgtttttaagtttgtttttgacatgtttatttggcaaattttataatgaagttttaagttgaaaataaaatgtagcaacattttgatcaaaaaaaaaaaaaaa

SEQ ID NO: 602 - DNA, 6927 bp, HOMO SAPIENS
ggggggagggtggcggctcgatgggggagccgcctccagggggcccccccgccctgtgcccacggcgcggcccctttaagaggcccgcctggctccgtcatccgcgccgcggccacctccccccggccctccccttcctgcggcgcagagtgcgggccgggcgggagtgcggcgagagccggctggctgagcttagcgtccgaggaggcggcggcggcggcggcggcacggcggcggcggggctgtggggcggtgcggaagcgagaggcgaggagcgcgcgggccgtggccagagtctggcggcggcctggcggagcggagagcagcgcccgcgcctcgccgtgcggaggagccccgcacacaatagcggcgcgcgcagcccgcgcccttccccccggcgcgccccgccccgcgcgccgagcgccccgctccgcctcacctgccaccagggagtgggcgggcattgttcgccgccgccgccgccgcgcgggccatgggggccgcccggcgcccggggccgggctggcgaggcgccgcgccgccgctgagacgggccccgcgcgcagcccggcggcgcaggtaaggccggccgcgccatggtggacccggtgggcttcgcggaggcgtggaaggcgcagttcccggactcagagcccccgcgcatggagctgcgctcagtgggcgacatcgagcaggagctggagcgctgcaaggcctccattcggcgcctggagcaggaggtgaaccaggagcgcttccgcatgatctacctgcagacgttgctggccaaggaaaagaagagctatgaccggcagcgatggggcttccggcgcgcggcgcaggcccccgacggcgcctccgagccccgagcgtccgcgtcgcgcccgcagccagcgcccgccgacggagccgacccgccgcccgccgaggagcccgaggcccggcccgacggcgagggttctccgggtaaggccaggcccgggaccgcccgcaggcccggggcagccgcgtcgggggaacgggacgaccggggaccccccgccagcgtggcggcgctcaggtccaacttcgagcggatccgcaagggccatggccagcccggggcggacgccgagaagcccttctacgtgaacgtcgagtttcaccacgagcgcggcctggtgaaggtcaacgacaaagaggtgtcggaccgcatcagctccctgggcagccaggccatgcagatggagcgcaaaaagtcccagcacggcgcgggctcgagcgtgggggatgcatccaggcccccttaccggggacgctcctcggagagcagctgcggcgtcgacggcgactacgaggacgccgagttgaacccccgcttcctgaaggacaacctgatcgacgccaatggcggtagcaggcccccttggccgcccctggagtaccagccctaccagagcatctacgtcgggggcatgatggaaggggagggcaagggcccgctcctgcgcagccagagcacctctgagcaggagaagcgccttacctggccccgcaggtcctactccccccggagttttgaggattgcggaggcggctataccccggactgcagctccaatgagaacctcacctccagcgaggaggacttctcctctggccagtccagccgcgtgtccccaagccccaccacctaccgcatgttccgggacaaaagccgctctccctcgcagaactcgcaacagtccttcgacagcagcagtccccccacgccgcagtgccataagcggcaccggcactgcccggttgtcgtgtccgaggccaccatcgtgggcgtccgcaagaccgggcagatctggcccaacgatggcgagggcgccttccatggagacgcagatggctcgttcggaacaccacctggatacggctgcgctgcagaccgggcagaggagcagcgccggcaccaagatgggctgccctacattgatgactcgccctcctcatcgccccacctcagcagcaagggcaggggcagccgggatgcgctggtctcgggagccctggagtccactaaagcgagtgagctggacttggaaaagggcttggagatgagaaaatgggtcctgtcgggaatcctggctagcgaggagacttacctgagccacctggaggcactgctgctgcccatgaagcctttgaaagccgctgccaccacctctcagccggtgctgacgagtcagcagatcgagaccatcttcttcaaagtgcctgagctctacgagatccacaaggagttctatgatgggctcttcccccgcgtgcagcagtggagccaccagcagcgggtgggcgacctcttccagaagctggccagccagctgggtgtgtaccgggccttcgtggacaactacggagttgccatggaaatggctgagaagtgctgtcaggccaatgctcagtttgcagaaatctccgagaacctgagagccagaagcaacaaagatgccaaggatccaacgaccaagaactctctggaaactctgctctacaagcctgtggaccgtgtgacgaggagcacgctggtcctccatgacttgctgaagcacactcctgccagccaccctgaccaccccttgctgcaggacgccctccgcatctcacagaacttcctgtccagcatcaatgaggagatcacaccccgacggcagtccatgacggtgaagaagggagagcaccggcagctgctgaaggacagcttcatggtggagctggtggagggggcccgcaagctgcgccacgtcttcctgttcaccgacctgcttctctgcaccaagctcaagaagcagagcggaggcaaaacgcagcagtatgactgcaaatggtacattccgctcacggatctcagcttccagatggtggatgaactggaggcagtgcccaacatccccctggtgcccgatgaggagctggacgctttgaagatcaagatctcccagatcaagaatgacatccagagagagaagagggcgaacaagggcagcaaggctacggagaggctgaagaagaagctgtcggagcaggagtcactgctgctgcttatgtctcccagcatggccttcagggtgcacagccgcaacggcaagagttacacgttcctgatctcctctgactatgagcgtgcagagtggagggagaacatccgggagcagcagaagaagtgtttcagaagcttctccctgacatccgtggagctgcagatgctgaccaactcgtgtgtgaaactccagactgtccacagcattccgctgaccatcaataaggaagatgatgagtctccggggctctatgggtttctgaatgtcatcgtccactcagccactggatttaagcagagttcaaatctgtactgcaccctggaggtggattcctttgggtattttgtgaataaagcaaagacgcgcgtctacagggacacagctgagccaaactggaacgaggaatttgagatagagctggagggctcccagaccctgaggatactgtgctatgaaaagtgttacaacaagacgaagatccccaaggaggacggcgagagcacggacagactcatggggaagggccaggtccagctggacccgcaggccctgcaggacagagactggcagcgcaccgtcatcgccatgaatgggatcgaagtaaagctctcggtcaagttcaacagcagggagttcagcttgaagaggatgccgtcccgaaaacagacaggggtcttcggagtcaagattgctgtggtcaccaagagagagaggtccaaggtgccctacatcgtgcgccagtgcgtggaggagatcgagcgccgaggcatggaggaggtgggcatctaccgcgtgtccggtgtggccacggacatccaggcactgaaggcagccttcgacgtcaataacaaggacgtgtcggtgatgatgagcgagatggacgtgaacgccatcgcaggcacgctgaagctgtacttccgtgagctgcccgagcccctcttcactgacgagttctaccccaacttcgcagagggcatcgctctttcagacccggttgcaaaggagagctgcatgctcaacctgctgctgtccctgccggaggccaacctgctcaccttccttttccttctggaccacctgaaaagggtggcagagaaggaggcagtcaataagatgtccctgcacaacctcgccacggtctttggccccacgctgctccggccctccgagaaggagagcaagctccctgccaaccccagccagcctatcaccatgactgacagctggtccttggaggtcatgtcccaggtccaggtgctgctgtacttcctgcagctggaggccatccctgccccggacagcaagagacagagcatcctgttctccaccgaagtctaaaggtcccagtccatctcctggaggcggacagatggcctggaaacctctggctaatcgggccatccgtagagcgggaaccttcctgaggtgtccttgggccacccccaagtgttgggccatctgccaagagacagcgacccaaagccgaaggacaggtggcctggaaagatcccgcccaggtctgggagccccaggctggcctcagactgtggttttttatgtggccacctgagggcgccccaagccagttcatctcggagtccaggcctggccctgggagacagggtgaagggagtggtttttatgaacttaacttagagtctaaaagatttctactggatcacttgtcaagatgcgccctctctggggagaagggaacgtgactggattccctcactgttgtatcttgaataaacgctgctgcttcatcctgtgggggccgtggccctgtccctgtgtgggtggggcctcttccatttccctgacttagaaaccacactccacttctaacagggtttgagaggcttagtcagcactgggtagcgttttgactccattcttggctttctttttctttccagaaggatttttgtgcagaaatgggtcttttgttgccatgttagtcctccttggaaggcagctcagaaggcctgtgaaatgtcaggggacaggacccccagggagggaaccccaggctacgcactttagggttcgttctccagggagagcgacctcgtcccccgatcctgaccgcccttccggcccacgctctcctgtttggcttccacaggcctggacttctctggcttctctgcccacacactccctgcccccagtgtccctgcccctgccccagcacaggtgacttcatttctgtcctctcagctcagtggactcgctcaacttttgtataagtctccacttggtggcagcagcttgctgatgacttgttttaaaactttcatcctaaataaccttttgatacttgaatatttgtaagttttatacatagtttctaatttttttccgaacagatccagatacctaataagatgctggaatgtaatccctggacaatccgtgtcctggcagcatttggtcttcctctaagcgcctggctccgctgttctcaggagtgggttctgaagtctctggagaacaggatacgtggagggttaggaaggggccaggcctagagacgggagactccctcccggagcaggtggaggcacaggaccattcgctaccccatctgccgacacctgcgggggagcccaggcattctttgtaaaccctcctgaccacctggctcaaagaaaacagaagcatggagaccgccaagtattttcaagaaataaccccatgaatattccatcacttttttagaaagaggggcttggggcaggcagaggagagaagggagagcaaactgagagccaagtttccacacggtcctgcaggaggagaggatgcagctgcccagagggaagcaggatcacatttaaggaagtgtgtggggtccctggatgacaccagcacccagtgcggctctgtctggcacccgctcccaaggtgggaggagtgggtgtcccctgtgtgtcagtgggcagctcctgctgaacccgcagctcactagggagcctgacagtggggccatgcgcctgacactcctctctgcttgtggacctggcaaggcagggagcagaaaacagccacttgaaggctttctgtctgcgtctgtgtgcagtgtggatttagttgtgcttttttcttgctgggagagcacagccaccatttacaagcagtgtcaccgtcgtgggtggcgaggacagaacaggagcctctgctctctgtacctatctgggcccggtgggctcccttgtcctggcttccatctctgtctcagcgaccattcagccctgcgcaggaacacgtgttgcttagaaaagccaaatccagccttgtctctgcctcctctggtctcatgatgtgcatctgttaccttgaaactggaaaccagtctatcaatgtctgtgccaattttttattccctccccaacctccttccccatacgactttttatttatgtaggatgtgtgctgtctaatgatgggatgaccacacttttccatgttctaaaagtgctcctctcccgcagggtcccagggctggtggttgctttgggtctacagctacgtcttacccacctcctgcctcaacagcctgtgtggtggcaaagccggtgtggggctggggaacgcagcgttctccaggagggggacctggctctccttctgcaatgcaggcgaaggcctagatgccagtgtgacctcccacaaggcgtggcttccagactccccggccggaagtgatgcttttttgccttgggccctgggtttgaagcagcctggctttctcttggtaagtggctggtgtcttagcagctgcaatctgagctcagccacctacacaccaccgtggccgacactttcattaaaaagtttcctgagacga

SEQ ID NO: 603 - DNA, 25 bp, HOMO SAPIENS
aaagcaaagggaggataaaacagta

SEQ ID NO: 604 - DNA, 5259 bp, HOMO SAPIENS
gtactcactggatgcctgcaagtccaaacatcctgttcttttttgaactcctcactggagaaacagggaaaagctgtagttttttccttccactcatatcgagtgacacaaaaaaacaagcctgtcggggccgagctgcttgactctctgatgtttgggagcagatccgagcagctgagcagggtggctgttcctttcctggattagggctgaatctgtgggaaccagaccacccctgagacaggaggcagccctgatgcctctccagggcctgggcctgcagcggaaccccttcctccaagggaagcggggcccggggctcacgtcttccccgcccctcctgcctccttccctgcaggtgaacttccacagcccccggagtggccagaggtgctgggctgcacggacccaggtggagaagcggctggtggtgttggtggtacttctggcggcaggactggtggcctgcttggcagcactgggcatccagtaccagacaagatccccctctgtgtgcctgagcgaagcttgtgtctcagtgaccagctccatcttgagctccatggaccccacagtggacccctgccatgacttcttcagctacgcctgtgggggctggatcaaggccaacccagtccctgatggccactcacgctgggggaccttcagcaacctctgggaacacaaccaagcaatcatcaagcacctcctcgaaaactccacggccagcgtgagcgaggcagagagaaaggcgcaagtatactaccgtgcgtgcatgaacgagaccaggatcgaggagctcagggccaaacctctaatggagttgattgagaggctcgggggctggaacatcacaggtccctgggccaaggacaacttccaggacaccctgcaggtggtcaccgcccactaccgcacctcacccttcttctctgtctatgtcagtgccgattccaagaactccaacagcaacgtgatccaggtggaccagtctggcctgggcttgccctcgagagactattacctgaacaaaactgaaaacgagaaggtgctgaccggatatctgaactacatggtccagctggggaagctgctgggcggcggggacgaggaggccatccggccccagatgcagcagatcttggactttgagacggcactggccaacatcaccatcccacaggagaagcgccgtgatgaggagctcatctaccacaaagtgacggcagccgagctgcagaccttggcacccgccatcaactggttgccttttctcaacaccatcttctaccccgtggagatcaatgaatccgagcctattgtggtctatgacaaggaataccttgagcagatctccactctcatcaacaccaccgacagatgcctgctcaacaactacatgatctggaacctggtgcggaaaacaagctccttccttgaccagcgctttcaggacgccgatgagaagttcatggaagtcatgtacgggaccaagaagacctgtcttcctcgctggaagttttgcgtgagtgacacagaaaacaacctgggctttgcgttgggccccatgtttgtcaaagcaaccttcgccgaggacagcaagagcatagccaccgagatcatcctggagattaagaaggcatttgaggaaagcctgagcaccctgaagtggatggatgaggaaacccgaaaatcagccaaggaaaaggccgatgccatctacaacatgataggataccccaacttcatcatggatcccaaggagctggacaaagtgtttaatgactacactgcagttccagacctctactttgaaaatgccatgcggtttttcaacttctcatggagggtcactgccgatcagctcaggaaagcccccaacagagatcagtggagcatgaccccgcccatggtgaacgcctactactcgcccaccaagaatgagattgtgtttccggccgggatcctgcaggcaccattctacacacgctcctcacccaaggccttaaactttggtggcataggtgtcgtcgtgggccatgagctgactcatgcttttgatgatcaaggacgggagtatgacaaggacgggaacctccggccatggtggaagaactcatccgtggaggccttcaagcgtcagaccgagtgcatggtagagcagtacagcaactacagcgtgaacggggagccggtgaacgggcggcacaccctgggggagaacatcgccgacaacgggggtctcaaggcggcctatcgggcttaccagaactgggtgaagaagaacggggctgagcactcgctccccaccctgggcctcaccaataaccagctcttcttcctgggctttgcacaggtctggtgctccgtccgcacacctgagagctcccacgaaggcctcatcaccgatccccacagcccctctcgcttccgggtcatcggctccctctccaattccaaggagttctcagaacacttccgctgcccacctggctcacccatgaacccgcctcacaagtgcgaagtctggtaaggacgaagcggagagagccaagacggaggaggggaaggggctgaggacgagacccccatccagcctccagggcattgctcagcccgcttggccacccggggccctgcttcctcacactggcgggttttcagccggaaccgagcccatggtgttggctctcaacgtgacccgcagtctgatcccctgtgaagagccggacatcccaggcacacgtgtgcgccaccttcagcaggcattcgggtgctgggctggtggctcatcaggcctgggccccacactgacaagcgccagatacgccacaaataccactgtgtcaaatgctttcaagatatatttttggggaaactattttttaaacactgtggaatacactggaaatcttcagggaaaaacacatttaaacacttttttttttaaggaaagaattggtatatttattatgttctgtttttctaaataacctgtggacaagggaagccccactgatttactccctctcttccccactccctgtgaggctgggctgaggcacggatccctgggccacagagcaagtctccaaatcagacagctgcctcagcccctgggatgtgtgatttcagctcctgtcacctcatgcaagggcgtggagaccagtagaggtgtggaggccaggcagagagaggagcctgctctgcggggggcccagctcatgggcactgccccttcagctagcctgcctccgtcccctgagtccaacagtgggagccctagctgggaagttctgatccccaaagccacagcaggggactgatggctatagcagaatgaggtcgggtcaggaccctcaaacaccatctgggaacaccaagcaccctgaatcgagactgcaggagccctgcggggtgagactgtgtcagagatacactgctggccacaagtgtcccctctcagtcccaccttttcgggctgtcccatgtctatctcaggggcccgttacctctctgcagcagtcccccatcccagccacaccagggtctgtccggccaaccctcttccccagggaaaggagaaaagagaaaacaggctgggcccggtggctcactcctgtaatcccagcactttgggaggttgaggtgggcggatcacctgaggtcaggagtttgagaccagcctggccaacgtggtgaaaccccatctctactaaaaaaaattacaaaaattagccgggagtggtggtgggcacctgtaatcccagttactcgggaggctgaggcaagagaatctcttgagctcaggaggcagaggttgcagtgagctgagattgcgccactgcactccagcctgggtgacagagggagactccgtcccaaaaaaaagaaaagagaaacagctgtcacctcccgcaggacccaaatcctctctctgagcaccgtcatccaccacatggctgggcctggctcccaggaccagtccagtcctctagtgccttatctgaggctgcagccgccagtctccaccccaaggagacagcccctgctcctagatgcccttggcctccgcagtgcagcccccaggtgtcctgactgaagcacaggccatagccccatttccccggtgcctgcagggctaacctccacgggagcccaggagctctggccggcaggtccatggcacagggcatcggaagactgcaaaactgctggacttaccctgggctgcagtccattgtcggcccctgggttgaatcaagatagtacttgcagctagatggatgcttttagccaggggacattgtgaggggaagattcctccacccagtctggcctgtggtgtctgtctcctccctgagaccacagcttctccagtagcagactcatgggcgccaccaagtggaagcacctggagcggcctctgccatccagtggggaagccaggccccgagacggaggtgggggcagcacgtgccctccacagccaccgctttcccgcctcagcagcccaggcctcctggcccagccctgcctggacagtgctctcccctcacccgggaagctggaatcctcctgcccgagaggaagcagacggcacagggacacccctgccaccttgggatctgcctccaagctggtgcagggtatcgagagtggattccagatggaggtcctggtcccagcacgcagcagtcctggtagctctgcagaggagacaggaacccgagaagtagctgaagcagaagccagccgcagtccccttgccacatagaggcgggcttctcccagccatggtgtcccctctgcctcccctcccccgaccctcctgccttccgcgtggagggtggtggtcctgtagtgtcagcaccagcaccatgggcttggaccccctccctggacacaggcaggtgtcctagggctgggggtgcagcccgagggaatggagaccacactcatggctcaggtctgccggggccggcagggggttggggaagaagagggctcaggcccagcaggggtggaagcccctgccactgccactacccgctccagagctttaaggaaaatgaagtgagacccctccccttaggcctggggagccatagggctggcttctctgtgggtgcgtggacgtggggttgggagctgggaatctattttttgtattatgttttgagctactgtagttttggcgtggcactattgtaatggaaataaaatacttgtacggagggcaaaaaaaaaaaaaaaaaa

SEQ ID NO: 605 - DNA, 25 bp, HOMO SAPIENS
tcccaacccttcttgaactgggtct

SEQ ID NO: 606 - DNA, 8398 bp, HOMO SAPIENS
cacagaagccctctagccaaggcctcgggcagccctaccaaatgaatatgggcacttgagttttctaggagggctttcctgctgccctgggtctcatccaactggtatccatctaaacattcccacccagggttattcatgctagaggaagaagaatgccctttccagagccagttcttggggaaaagaggaactgttgatatagccagagcccgaaaagaagattactctgcaacagctaaagcctcacgaaagattttacttgtagatcaactttcaaaatgtaggaagtcagaatgggtgacatcatcagaaaaatatgtggagctgatcacaagaagtgaagaacccagagcacgaaagcggttgtgactcctgggcccagggagttgacagcgtctgggtttcagaggagccagcgcctccgagttgtcttgaagtgaggctctgctgtagtcctgttcttctggctctaagatctgaatgttgtgaccactaatttgctctttcctggagagtaaccccagtttggtccacaaggcttgctgcccaatctttgccaacagttgaaccaagactctgaggctgatatgcaatgtcacttacaacattaatcagatactgcatttaaggttcacagtgtcttcacctggaatagattccacctcaagaaaccagtttctttgctcatccataagaagcaactcctcatctgatcaagttttataataagattgcagaaattcagtctcatctttaggctccacttctagttcttatgctatttccaccacatctgcagttacttcctccactgaagtcttgaatctctcaaagtcatccatgagggttggaaccaacatcttccaaactcctgatcttgatgtggaagaaatggaggactcagaaccaaggatttccaagtgatttcttccaaagcacaggaatctcactctgttaaagctggtctgttctaactgagatgacagtcatgtccctttccagggacctcaaggacgactttcacagtgacacggtactctccatcttaaatgagcagcgcattcggggcattttatgcgatgtcactatcattgtggaagataccaaatttaaagcccatagcaatgttctggcagcttcaagcctgtattttaaaaatatcttttggagccatacaatctgtatttccagccacgtcctggagctggacgatctcaaagctgaagtgtttactgaaatacttaattatatctacagttccacagtcgttgtcaagagacaggaaacagtcactgatctcgcagctgcaggaaaaaagctgggaatatcgttcttggaagaccttactgatcgcaacttctcaaattccccgggtccctatgtattctgtattactgaaaagggagtggttaaagaagaaaaaaatgaaaaaaggcatgaagaaccagccatcactaatgggccaaggatcacaaatgcattttccatcatcgaaacagaaaatagtaataacatgttttccccgctggacttgagggcaagtttcaaaaaggtctccgactccatgagaacagctagcctttgcctggagaggacggacgtctgccacgaggcagagcctgtccgcacacttgccgagcactcatacgctgtttcttccgtagctgaagcttacagaagtcagcctgtacgtgaacatgatggcagttcacctggtaacacagggaaagaaaattgtgaagcccttgcagcgaaaccgaaaacatgccggaagccaaagacattctccataccacaggattcggattcagccacagaaaatataccaccccctccagtatccaacttagaggttaatcaagaaagaagtccacaaccagctgctgttctcactcgttcaaaatctccaaacaatgaaggagatgtccatttttccagggaagatgaaaatcaatcttctgatgttcccgggccgccagccgcagaggttccacctctggtgtacaattgtagctgctgttccaaagcctttgacagcagcactctgctcagtgcccacatgcagcttcacaagccaacccaggagcctttagtgtgcaagtattgcaacaaacaattcaccaccctgaacaggttggatcggcatgaacagatctgcatgaggtcaagccacatgcccattcctggaggaaaccaacgctttttagaaaactatcctaccattggacaaaatggaggttcattcacaggtccagaacctttattatctgaaaataggattggtgaattttccagtaccggaagtactttgccagacacggaccacatggttaaatttgttaatgggcaaatgctctacagttgcgttgtgtgcaaacgtagttatgtgaccttatctagcctccgaagacatgcaaatgttcactcctggagaagaacatatccttgccattactgcaacaaagtatttgcattggctgagtacaggacaaggcatgaaatttggcatacgggagaaagacgatatcagtgcattttctgtcttgaaactttcatgacctactatatactcaaaaatcatcagaagtctttccatgccatcgatcatagactttccatcagtaaaaaaacagcaaatggaggcttgaagcctagtgtctatccgtataaactttataggctactgcctatgaaatgcaagagagccccttataagagctaccgaaattcttcctatgaaaatgcacgagaaaacagtcaaatgaatgagtctgcacctggtacctatgttgttcagaatccacacagctctgaattaccaacgctgaatttccaagatactgtaaacaccctgaccaacagtccagccatcccattggaaacatctgcatgtcaggacatacccacttctgccaatgtacaaaatgcagagggtaccaaatggggagaggaggcattgaaaatggatcttgacaataacttttattcaactgaggtgtcagtttcttccactgaaaatgctgtcagttctgacctccgggcaggggatgtacctgttttatctttgagtaatagcagtgagaatgccgcctctgtgatcagctacagtggctctgcaccctcggtcattgtacacagcagccagttttcatcggtgatcatgcacagcaatgccattgctgccatgaccagcagcaaccacagagccttttcagacccagctgtcagtcagtccctgaaagatgacagtaagcccgagccagataaagtgggtaggtttgcaagcagacccaaaagcattaaggagaaaaagaaaactacatcacataccaggggagaaataccggaggagtcaaactatgttgctgatcctggaggatcactgagcaaaaccacaaatattgctgaagaaaccagcaaaattgaaacctacattgcaaaacctgctctgccgggaacctccacaaatagtaatgttgcacccctttgccaaataacagtgaaaattggaaacgaagccattgtgaaaaggcacattctaggatctaaattgttttataaaagagggagaagacccaagtatcagatgcaggaggagcctttgccacaggggaatgacccagaacccagtggagacagcccactcgggctttgccaatccgagtgcatggagatgagtgaagtgttcgatgacgcaagtgaccaggattccactgacaaaccgtggcgcccttactacaactacaaacccaaaaagaaatccagacagttgaaaaaaatgaggaaagtcaactggaggaaggagcacggaaacaggagcccgagccataaatgtaaatacccagcagaactggattgcgccgtggggaaggctcctcaggataaaccctttgaggaagaagaaactaaagagatgcccaagctgcagtgtgaactctgtgatggagacaaagcagtgggggctggaaaccaaggaaggccccaccgacatcttacttctcggccatatgcctgcgagctctgcgccaagcagttccagagcccttccacactcaaaatgcacatgagatgtcacaccggggagaagccataccagtgcaagacctgcggacggtgcttttcggtgcaaggaaacttacagaaacatgaacgcatccacctgggcttgaaggagttcgtctgtcagtattgcaacaaggcattcaccttgaatgagaccctcaaaatccatgaaagaatccatactggagaaaagcgttaccactgtcagttctgctttcagagatttttgtatctctccaccaaaaggaatcacgagcagaggcatattcgggagcataatgggaagggctatgcctgcttccagtgccccaaaatttgcaaaacagctgctgcccttggaatgcaccaaaagaaacacttattcaaaagcccaagtcagcaggagaaaataggtgacgtgtgccacgaaaactcaaatcccttggagaatcaacatttcattggttcagaagacaatgaccaaaaggataacatacaaaccggtgtggaaaatgttgtcctttgagtggcaagaattagaaaaatcttcaaaaatatagttggtggtttttttagttatgatttaagtttagtttcattttgtccatgtgacagtcatgaaggagtgaaattaaaaaaaaaaaaaactcatttgtgaaaattccagaaaaaggatcctaatatctactttgggttttagcattaactttatgcaaagtgcacaaaaacaaaatagctgactcctccaatatcccaagtttcttgtgaaagttaataaaattcttagctgtggtatttctaccagtgaaaaaaggagtttaattttagcctagtttaaaactttctaataattgctaataagaactggctgctgaactgtctttagtcactggagaaaataagggtcagatatcctgaagatggcatcttcgtaaatatgttacgtggtaataagctgtgtgacggtctttattcccatctggcttctgcactattaaaatttgtttaaattaatggatacacatgaaatacttaaacaatataactgaaattatgtgcataatgagtaacctaaagtaggacattcatacattatgtagaactacttttctgcaacacaaaccttgtaaaatacatatataaatcactataacttttaactgtccatatcccctgtagagaattatgaggagcaatagatctgcaaataatgaggactgatgtaaaaatcaatagaaagcattttgaatatgatttaagagcatgtgaatgcttttagatggaatgctgttcccttgaagttatggctgagctgttcttagaactggtctactcaattcacagaaaacataggtcatgccttatctatgggggaacaccctcccagaatttacctgtgattacctgtgctgcatattactttgcaatggcctcatctcagagaatgaaagagggtcacattgttctgaaactctctgcagtcttccaaccaccacaaggccatggatgtgggggtctattccagacagacttaagggctcaagtggaacctgccatctcccattccactgaaggactgtccaagagatttagtgcaaggtacactgcagtagtgaattcccaggcacttgaaagtgactgcctaatccctacaattactagccttgttggagattatgcagcccacaagtacagactagtataaagcaaaaggacaaaggaacccccaccctccaccccacccattaatgacttgagtgggcaagaagaagtgatggccttccttgcctaaaacagtagctttgtttttagggggtgggaaggtaggatgtggagtgacatggttctatcctttacttatgagactcagaaatatatctacaaagccagatgctctgtcttcatatttgcagacatctagaccccttgctaaaaacccactgaagttttttttttatgttctttgacccacaccatcaacactaccctcaaatctaattgccctacagcatattctatcatgtggactaggttcctggaaagccggaactcatgattctttttcaaactgccagaatagaagggagagagaaaacatttctaccctttgatcaccagtgtgaacagaatccggaatgcagtttcagcgtgacctgcagtcattcatgttcattggatttgacagatggaaacccaaggttatcgaagattggaaggttatcattgtgaagaagtagctcaaaggactccggtttctgtctacaagtgtgatgtctccatgaagaagacttagtatggatttgggtgggtaagaaagcatttaaacgcccaggaaaggacatgattaaagttgaccttttaatactgtagtaccttgctgttaagtaaccccactattgtatctgcatttatcttttgttcatctactttcacttacatacagtattatataagtagagaaaaatgggaaaatgcaagcaaattcaactttattttatacattgtatatatgtacaccctacactattcatttgggttttattaaagagatagtcacaaagggcttacgaaaatcatttttgaattgataattagaatattgaataagcaatcctatgatccactaatttgttttatcagttaataatattaatcaaagacatttactgtatattctagtcattttgatttgagttaaccccaaatataaaattacctgtagtgatgtctctctcccagcccttatatgtggatattttttaagtggacttgtatgctgataattctagaccaaagtaaatatggcagaatatttatacatgaaaaaataattttgcaaatattttctataattgtattcatttaaaatgttgatagcttgtgttagtttcagggaggggtgtatattttgataaaaaaatacttgactttgtaattctgtatattctatacaatttatagcagagccgttttaagacagccttgtcacatttttttgttaattgtgaaaattttattgagtgatgtttaagtatgcattgagtacatgaccaactagaattaaagtaagtgtaaacagtgaacatactgtatgctgtacaagatataatgtaacttgctgttttagcatctgtattttggttagaagatattattaaatgcagatgttaaggattggaaaagtctaattttatttttagaaataatggatataaatttgtttttgcttgattaaaatagcttattcctacattaagtctctttttaaatgttttcatgttatttcttttgtgcagctatttcatctgtgtgagtcacagctttgtttccacgtattattcagtttatttctgtttccttacttgtttacattccgtggtacctacttacatgcttaggagtcaaatggattatgacattaggaaaaaagcagaataaaagagattgaagtcttctgatgattgagtgttttggataggcctgatcttataatgataaatcagagaatgaaatgctctccaggaagcattctgctccactcatccgtgggaaacaaattacatttattgagtaccaggcactgggcaatgtctttacataggctatttcattaacacacacgcaccagaattcgacctcattatcctcgttttatagtgactttgagaaggtctcacaaccagacaaagccaggatgctaacctaggtctgcctgactccaaagcccatgtttttgttccttctcaacactgtagagaaaaatcatttatagaaactgaacagagtatgaggaaaggagatatgataaagtaatgcagctttaggatggcagttagtgactgccctggaacaggattaaaggaggctgtgtcaggttcagcttcccctgaattgggcttcccttatatctcaggagattgccctataaaatcagtaaaatttgtgcacttttttaaggatatggagtaaaattgtaatagcattataagctggtaattttcacacaaagaaaaaaatacgttccgtcgtcacagactctactcctaaacttagctaactaactatcttgcaaatgcctgcagtttgtcccagtgggcaatgtgagaggggatgtcggtggctcaggcagcacagtccatcaccaacacagagaaaattactgccaggcctaccggtggctggccagtagcatcaattttgtattggaagggcaatccaaaccagattcaccaaaaatttgataactgttatctgctaaaactaacttcattatgtacaagaacaacagatttaatattgaaagcatctgtaacaattgggaaagtaaaagcataaaacaaaaaaaaaaaaaaaa

SEQ ID NO: 607 - DNA, 3296 bp, HOMO SAPIENS
atgatctgcttttcagataacaccatccagtcggttttctgttgctgctgttgctgttcagtgcagaagcgacaaatgagaacacagataagcctgagcacagatgaagagcttccagaaaaatacacccagcgtcgcaggccgtggctcagccaattgtcaaataagaagcaatccaacacgggccgtgtgcagccgtcaaaacgaaagccactgcctcccctcccaccctctgaggttgctgaagagaagatccaagtcaaggcactttatgattttctgcccagagaaccctgtaatttagccttaaggagagcagaagaatacctgatactggagaaatacaatcctcactggtggaaggcaagagaccgtttggggaatgaaggcttaatcccaagcaactatgtgactgaaaacaaaataactaatttagaaatatatgagtggtaccatagaaacattaccagaaatcaggcagaacatctattgagacaagagtctaaagaaggtgcatttattgtcagagattcaagacatttaggatcctacacaatttccgtatttatgggagctagaagaagtacggaggctgccataaaacattatcagataaaaaagaatgactcaggacagtggtatgtggctgaaagacacgcctttcaatcaatccctgagttaatctggtatcaccagcacaatgcagccggtctcatgactcgtctccgatatccagttgggctgatgggcagttgtttaccagccacagctgggtttagctacgaaaagtgggagatagatccatctgagttggcttttataaaggagattggaagcggtcagtttggagtggtccatttaggtgaatggcggtcacatatccaggtagctatcaaggccatcaatgaaggctccatgtctgaagaggatttcattgaagaggccaaagtgatgatgaaattatctcattcaaagctagtgcaactttatggagtctgtatacagcggaagcccctttacattgtgacagagttcatggaaaatggctgcctgcttaactatctcagggagaataaaggaaagcttaggaaggaaatgctactgagtgtatgccaggatatatgtgaaggaatggaatatctggagaggaatggctatattcatagggatttggcggcaaggaattgtttggtcagttcaacatgcatagtaaaaatttcagactttggaatgacaaggtacgttttggatgatgagtatgtcagttcttttggagccaagttcccaatcaagtggtcccctcctgaagtttttcttttcaataagtacagcagtaaatctgatgtctggtcatttggagttttaatgtgggaagtttttacagaaggaaaaatgccttttgaaaataagtcaaatttgcaagtcgtggaagctatttctgaaggcttcaggctatatcgccctcacctggcaccaatgtccatatatgaagtcatgtacagctgctggcatgagaaacctgaaggccgccctacatttgccgagctgctgcgggctgtcacagagattgcggaaacctggtgaccggaaacagaatgccaacccaaagagtcatcttgcaaaactgtcatttattgtgaatatcttcaccatatggggtcacttatggtgaatatctttcttcagagttgctgactcttgaaaacagtgcaaagatcacagtttttaaaagttttaaaaatttaagaatattcacacaatcgtttttctatgtgtgagagggatttgcacactcttatttttctgtaaaatatttcacatcccaaatgtgaagaagtgaaaaagacttcgcagcagtcttcattgtggtgctcttcatgatcatagccccaggaacccttgaggttcttcttcacaaggctgagagtgcttccttcttgaagacgagtgtcattcatcacttcagtgatccatgcatagaatatgaaaataaattcttccaactcatgggataaaggggactcccttgaagaatttcatgtttttgggctgtatagctctttacagaaaatgcacctttataaatcacatgaatgttagtattctggaaatgtcttttgttaatataatcttcccatgttatttaacaaattgtttttgcacatatctgattatattgaaagcagttttttgcattcgagttttaaacactgttataaaatgtagccaaagctcacctttgaacagatcccggtgacattctatttccaggaaaatccggaacctgattttagttctgtgattttacactttttacatgtgagattggacagtttcagaggccttattttgtcatactaagtgtctcctgtaattttcaggaagatgatttgttctttccagaagaggagacaaaagcaagatagccaaatgtgacatcaagctccattgttttggaaatccaggattttgaattcgagatgaaacaaccagcaatcacagttaaatcttaactttgcctgcactctttgtaggaatgatcagaaatttatctttatcattctgagtgcttcaggagtacaataggaagaaagatactggagaaagcacaagtgtaatcaccatgaagtctgacaacaggagcccattatttgcgtactgtcccaccctgtatcatggttctctgggaacaagctttatgattctcattagagtttatttgttgattgtcagtagttgcgacttttaaattatatttcccccactcaaagaatggtatctttatatatcaatgacattcaataaatgtgtattatttctaatgagaatcagttacaagaggagacttgatagttcaagtagtggtctcagaaatgtttgggctgaatgtggtggctcatgcctataatcccagcactttgggaggccaaggtgggaagataacttgagcccagtttgagaccagcctgggcaacaaagtgagatcctatctctattacaagaaaaaagaaaaaagaaaaaaaaagctaggtgtagtggtgcatgcatgcacgtagtcccagctacttgggaggctgagacaggagcccaggagatcaaggctgcagtgagccatgattgtgccactgcactccagcctgggtgatagagcgagaccctgtctcaaaaacagaaacaagtttgtatgagatgctaggctgtttctgagactatcacaccccctttcctatgactcctgttacggtgaggaaagacagaaggctgttattactgagacctcgattcacataacatga

SEQ ID NO: 608 - DNA, 405 bp, HOMO SAPIENS
atggagaatttagcacctataatccttccagagatgcacaccacgcaaccacgtgagtcccctctggctctgaattccgagagcagctaccaacacaggcctccgctgcctgcactcagcacacctatcggaaagcgccagtgctggcatgggctttccctccctggcggctgctcctcctgcacccccatgcccaggcactccggccagaaacaagggaggagtctggggactgatcctccccctctcacctcccacatctacccaggtaccacaccctgccatctgtctcctgctgccctctgtcactgcaggagcccctggagagcacatcacccctcactaggctgcagccacagcccctctcagaaaaccctgctgtctgctttccagtgcagccctgtc

SEQ ID NO: 609 - DNA, 4153 bp, HOMO SAPIENS
acgagagccgggtggacccagggtggggaactacctcttcctctccacgcggttgagaagaccggtcggcctgggcaacctgcgctgaagatgccgggaaaactccgtagtgacgctggtttggaatcagacaccgcaatgaaaaaaggggagacactgcgaaagcaaaccgaggagaaagagaaaaaagagaagccaaaatctgataagactgaagagatagcagaagaggaagaaactgttttccccaaagctaaacaagttaaaaagaaagcagagccttctgaagttgacatgaattctcctaaatccaaaaaggcaaaaaagaaagaggagccatctcaaaatgacatttctcctaaaaccaaaagtttgagaaagaaaaaggagcccattgaaaagaaagtggtttcttctaaaaccaaaaaagtgacaaaaaatgaggagccttctgaggaagaaatagatgctcctaagcccaagaagatgaagaaagaaaaggaaatgaatggagaaactagagagaaaagccccaaactgaagaatggatttcctcatcctgaaccggactgtaaccccagtgaagctgccagtgaagaaagtaacagtgagatagagcaggaaatacctgtggaacaaaaagaaggcgctttctctaattttcccatatctgaagaaactattaaacttctcaaaggccgaggagtgaccttcctatttcctatacaagcaaagacattccatcatgtttacagcgggaaggacttaattgcacaggcacggacaggaactgggaagacattctcctttgccatccctttgattgagaaacttcatggggaactgcaagacaggaagagaggccgtgcccctcaggtactggttcttgcacctacaagagagttggcaaatcaagtaagcaaagacttcagtgacatcacaaaaaagctgtcagtggcttgtttttatggtggaactccctatggaggtcaatttgaacgcatgaggaatgggattgatatcctggttggaacaccaggtcgtatcaaagaccacatacagaatggcaaactagatctcaccaaacttaagcatgttgtcctggatgaagtggaccagatgttggatatgggatttgctgatcaagtggaagagattttaagtgtggcatacaagaaagattctgaagacaatccccaaacattgcttttttctgcaacttgccctcattgggtatttaatgttgccaagaaatacatgaaatctacatatgaacaggtggacctgattggtaaaaagactcagaaaacggcaataactgtggagcatctggctattaagtgccactggactcagagggcagcagttattggggatgtcatccgagtatatagtggtcatcaaggacgcactatcatcttttgtgaaaccaagaaagaagcccaggagctgtcccagaattcagctataaagcaggatgctcagtccttgcatggagacattccacagaagcaaagggaaatcaccctgaaaggttttagaaatggtagttttggagttttggtggcaaccaatgttgctgcacgtgggttagacatccctgaggttgatttggttatacaaagctctccaccaaaggatgtagagtcctacattcatcgatccgggcggacaggcagagctggaaggacgggggtgtgcatctgcttttatcagcacaaggaagaatatcagttagtacaagtggagcaaaaagcgggaattaagttcaaacgaataggtgttccttctgcaacagaaataataaaagcttccagcaaagatgccatcaggcttttggattccgtgcctcccactgccattagtcacttcaaacaatcagctgagaagctgatagaggagaagggagctgtggaagctctggcagcagcactggcccatatttcaggtgccacgtccgtagaccagcgctccttgatcaactcaaatgtgggttttgtgaccatgatcttgcagtgctcaattgaaatgccaaatattagttatgcttggaaagaacttaaagagcagctgggcgaggagattgattccaaagtgaagggaatggtttttctcaaaggaaagctgggtgtttgctttgatgtacctaccgcatcagtaacagaaatacaggagaaatggcatgattcacgacgctggcagctctctgtggccacagagcaaccagaactggaaggaccacgggaaggatatggaggcttcaggggacagcgggaaggcagtcgaggcttcaggggacagcgggacggaaacagaagattcagaggacagcgggaaggcagtagaggcccgagaggacagcgatcaggaggtggcaacaaaagtaacagatcccaaaacaaaggccagaagcggagtttcagtaaagcatttggtcaataattagaaatagaagatttatatagcaaaaagagaatgatgtttggcaatatagaactgaacattatttttcatgcaaagttaaaagcacattgtgcctccttttgaccacttgccaagtccctgtctctttcagacacagacaagcttcatttaaattatttcatctgatcattatcatttataactttattgttacttcttcatcagtttttccttttgaaaggtgtatgaattcattacatttttattctaatgtattatctgtagattagaagataaaatcaagcatgtatctgcctatactttgtgagttcacctgtctttatactcaaaagtgtcccttaatagtgtccttccctgaaataaatacctaagggagtgtaacagtctctggaggaccactttgagcctttggaagttaaggtttcctcagccacctgccgaacagtttctcatgtggtcctattatttgtctactgagacttaatactgagcaatgttttgaaacaagatttcaaactaatctgggttgtaatacagtttataccagtgtatgctctagacttggaagatgtagtatgtttgatgtggattacctatacttatgttcgttttgatacatttttagcttctcattataaggtgattcatgctttagtgaattcttcatagatagtatatataaaagtacattttaatagaaagccagggttttaaggaatttcacatgtataaggtggctccatagctttatttgtaagtaggctggataaatggtgcttaaatggtaatgtactccacttcttcctattggaagattaacattatttaccaagaaggacttaagggagtagggggcgcagattagcattgctcaagagtatgtaaaaaaaaaaaaaaaaaaaaagaaccaaaccactggaaataatcaaatgcaaaaaggtaacaaattcataactggaaagcaaagagaagaacaagtatgatttggatgataaagcattgttttaatggtgaaaacttcacagatcactaatgtttctagaggttaacttcaagtgggcaagctggggtttttaggtagtcagtggcctagttcctaaagccacagtataggatctgttaaactgaatgtctgttgaaagtttgttttagctgcttggaggcttccttttaagacaaactgtatgtgattaagttgttttgagggaactgaagaacctgatgtagcccctggccagataactgcctgatttctcagatattatttctctgggaaacattctacatagcacaggagcttaagagtggcattatcttctcgccttaatttccagagattatttctgtactgagaatcctggaactactatgctaggaaatttaaagctgcatggtctgtcttgttttcatttaattattgtgaatacctagaatctttcttggtcctgatttctcttgcttaatccagtctttatctctaactgccccttatttgatcaccatgtactaggagctctgatagccagctcagctcctaatccttgaggcaacattctttttctatttgaacttcagttctgtccttgaatcccgactagatatttcttgccctctggtctcagaattctcttggcttttattccttgatccacttgccagttttatcactttacccttgttcctcatggcttcccatcaagccatgggt

SEQ ID NO: 610 - DNA, 907 bp, HOMO SAPIENS
ctcctctctactctacccagcttgcgctccccagccgcaagtcggccgcgctttgcccgtcagcgcttggagctttctgcgtcgcttcccgctgcgcctgcgcggtcccgcctcgccccacgcgcgggctcgcgcttcggtttccccagacctgctcgcagcaccctgctgtcttcccggtccggcccgctgcccgcggcgccagcaccatgctcttctattcttttttcaagtcccttgtgggcaaggatgtggtcgtggaactaaagaatgacctgagcatctgtggaaccctccattctgtggatcagtatctcaacatcaaactaactgacatcagtgtcacagaccctgagaaataccctcacatgttatcagtgaagaactgcttcattcggggctcagtggtccgatacgtgcagctgccagcagatgaggtcgacacacagttgctacaggatgcggcaaggaaggaagccctgcagcagaaacagtgatggctcctcctcctcttcccctccctctttcattggtgacccataaccccaagtcccagcccagaacccctaacccccaatacttgaaggggttttgtttttttactaatgatggttttgtgggttttttttaagggatgagtggatgagaggagtaatagggaacagctatcctctcttgagaaggggaggataagtaggctgggaaacttcaaagccttcccagtccccagcacctgcctttctcactacttctctggagatggtaggagagtttcctaggtctttccagggcagcatgtgattcatttggggatggaaggaatctgtcccgcatcgggaataaaatttatgatgcaaaaaaaaaaaaaaaaaaaaaaaaaaaaaaaaaaaaaaaaaaaaaaaaaaaa

SEQ ID NO: 611 - DNA, 2368 bp, HOMO SAPIENS
gcgccgccaggcgtaggcggggtggcccttgcgtctcccgcttccttgaaaaacccggcgggcgagcgaggctgcgggccggccgctgcccttccccacactccccgccgagaagcctcgctcggcgcccaacatggcgggtgggcgctgcggcccgcagctaacggcgctcctggccgcctggatcgcggctgtggcggcgacggcaggccccgaggaggccgcgctgccgccggagcagagccgggtccagcccatgaccgcctccaactggacgctggtgatggagggcgagtggatgctgaaattttacgccccatggtgtccatcctgccagcagactgattcagaatgggaggcttttgcaaagaatggtgaaatacttcagatcagtgtggggaaggtagatgtcattcaagaaccaggtttgagtggccgcttctttgtcaccactctcccagcattttttcatgcaaaggatgggatattccgccgttatcgtggcccaggaatcttcgaagacctgcagaattatatcttagagaagaaatggcaatcagtcgagcctctgactggctggaaatccccagcttctctaacgatgtctggaatggctggtctttttagcatctctggcaagatatggcatcttcacaactatttcacagtgactcttggaattcctgcttggtgttcttatgtgtttttcgtcatagccaccttggtttttggcctttttatgggtctggtcttggtggtaatatcagaatgtttctatgtgccacttccaaggcatttatctgagcgttctgagcagaatcggagatcagaggaggctcatagagctgaacagttgcaggatgcggaggaggaaaaagatgattcaaatgaagaagaaaacaaagacagccttgtagatgatgaagaagagaaagaagatcttggcgatgaggatgaagcagaggaagaagaggaggaggacaacttggctgctggtgtggatgaggagagaagtgaggccaatgatcaggggcccccaggagaggacggtgtgacccgggaggaagtagagcctgaggaggctgaagaaggcatctctgagcaaccctgcccagctgacacagaggtggtggaagactccttgaggcagcgtaaaagtcagcatgctgacaagggactgtagatttaatgatgcgttttcaagaatacacaccaaaacaatatgtcagcttccctttggcctgcagtttgtaccaaatccttaatttttcctgaatgagcaagcttctcttaaaagatgctctctagtcatttggtctcatggcagtaagcctcatgtatactaaggagagtcttccaggtgtgacaatcaggatatagaaaaacaaacgtagtgttgggatctgtttggagactgggatgggaacaagttcatttacttaggggtcagagagtctcgaccagaggaggccattcccagtcctaatcagcaccttccagagacaaggctgcaggccctgtgaaatgaaagccaagcaggagccttggctcctgagcatccccaaagtgtaacgtagaagccttgcatccttttcttgtgtaaagtatttatttttgtcaaattgcaggaaacatcaggcaccacagtgcatgaaaaatctttcacagctagaaattgaaagggccttgggtatagagagcagctcagaagtcatcccagccctctgaatctcctgtgctatgttttatttcttacctttaatttttccagcatttccaccatgggcattcaggctctccacactcttcactattatctcttggtcagaggactccaataacagccaggtttacatgaactgtgtttgttcattctgacctaaggggtttagataatcagtaaccataacccctgaagctgtgactgccaaacatctcaaatgaaatgttgtggccatcagagactcaaaaggaagtaaggattttacaagacagattaaaaaaaaattgttttgtccaaaatatagttgttgttgatttttttttaagttttctaagcaatatttttcaagccagaagtcctctaagtcttgccagtacaaggtagtcttgtgaagaaaagttgaatactgttttgttttcatctcaaggggttccctgggtcttgaactactttaataataactaaaaaaccacttctgattttccttcagtgatgtgcttttggtgaaagaattaatgaactccagtacctgaaagtgaaagatttgattttgtttccatcttctgtaatcttccaaagaattatatctttgtaaatctctcaatactcaatctactgtaagtacccagggaggctaatttcttt

SEQ ID NO: 612 - DNA, 1386 bp, HOMO SAPIENS
ggaagccgggattcgccctccggggagcgattggtcctcgggaggggcggggaggtggacgcgggtaccggcggtcgtcgggtcggcagcctttggtcagttggcagcggcaagcgcgctgcggttccggtggcgccatgtcgttctgcagcttcttcgggggcgaggttttccagaatcactttgaacctggcgtttacgtgtgtgccaagtgtggctatgagctgttctccagccgctcgaagtatgcacactcgtctccatggccggcgttcaccgagaccattcacgccgacagcgtggccaagcgtccggagcacaatagatctgaagccttgaaggtgtcctgtggcaagtgtggcaatgggttgggccacgagttcctgaacgacggccccaagccggggcagtcccgattctgaatattcagcagctcgctgaagtttgtccctaaaggcaaagaaacttctgcctcccagggtcactaggcgggcagcccacacccaccccagacggccaccacactgaggccacacgttggccattccaccttggagttggaaccctgggcgtcgagacaggaaggcagggcgcagtggttgaaacatcaggacactcccaaggccccggctctgaacaagaccttttcgtttcttggaaaagagactcatttgctgatggttcatgccttctgctgggacaggcctgggctgtgcagccacactgtcggctgacttagccccctgctcactctaggtgcctccaggaggtgagccctgggtgcagctggtctctgaatgacgttacaccctcaccttcttttcctggccctgtctctggactctcccctgtgaggcccaattccaagacagactctcgtcctcaccgaagcttaggcccacatctcccaggctgcttaggagacagaatggaaacggaggccgcccctgccagccgccctggccctggtcactgcatgatccgctctggtcaaacccttccaggccagccagagtggggatggtctgtgacctgctgggaaggcaggctgatggggcacacccttggcctctcgtccacgaggggagaaacctaaaccctgtttcacaatctgtgcggaagtagcttgcctcacttctgcttaggaaagcggctgttgctccataactctaaccagcacagggctgaggcctgcagtgcacacctgcagggaggcccttcccaaggtgtggtgactgtgccttactgtacatgctcggaggcctggccatataggagggtgggtgatgctgaaatcaccccccatcttaagtaattactttctggagtaatcaggtggaaatccatagacaaatgaaacattcagaaaaaaaaaaaaaaaaaaaa

SEQ ID NO: 613 - DNA, 10499 bp, HOMO SAPIENS
cttggaataggtctgcggctgcacaccgcccggacgccggggttcctgcgtcccccgccccctctgatcgcggctgggtagccgagccgcaggcagctgggggcccccgaacgccgcctctgcatcgcgccgcccctgccccgggctccggtagctttcgggcttccgcactgcccgccgcgccctgcccacagggaagcgcttccccaggcggcggcggtcctggtgcggaccctccggccgcagccatgtgggacccgcgggcagctagggttcccccgagggacttggctgtgctgctgtgcaacaaatcaaatgcatttttcagccttgggaagtggaatgaggcatttgttgctgccaaggaatgtctccaatgggatccaacctacgtgaagggatactaccgagctggttattccttgctgaggttgcaccagccttacgaagccgctcgcatgttttttgagggtctgcgacttgtgcagagaagccaagaccaggcaccggttgctgatttccttgttggagtcttcaccactatgagcagtgactccattgttttgcaaagtttcttgccttgctttgatcatattttcacaactggattcccaacagaagtgtggcaatctgtaatagaaaagttggcaaagaaaggattatggcattcatttctgcttctgtcagcaaaaaaagaccgattaccaagaaatattcatgtcccagagttatcactgaaaagtctctttgagaaatacgttttcattggactttatgagaagatggaacaagtgcccaagttagtccagtggctcatctccattggtgcaagtgttgagactataggaccgtatccccttcatgccctcatgcgactctgtatccaagccagagaaaaccatcttttccggtggttaatggatcacaagcccgagtggaaaggccgcattaaccagaaggatggggatggctgcactgtcctgcacgtcgtcgctgcccactccccaggatacctcgttaagcgacaaacagaggatgtgcagatgctcctgcgctttggggcagatcccactttgctggatcgacagtctcggtctgttgtggatgtcctgaagaggaataagaacttcaaagccatcgagaaaatcaacagtcacttagaaaagctagctacgtgttctaaggacctatcaggattcagcaatggtgatggacccactagtgaaaacgacattttcaggaaggtcttggagcagctggtgaagtatatgaactcaggaaaccggttattgcataaaaactttctgaagcaggaagtagttcagaggttcttgcgtctcctttctactctgcaagaaattcctcctgacctggtctgtgatattaatcaagactgtgccaccaccgtcttcaaattcttattggaaaaacagagatggcctgaggtgcttctgctgctgacccgcaaagtaagtggagaaccaccgcttggggattgcctcatcaaagactgcaacttctcagacctcgacatctgtaccatcatcccccatctcagcacctgggaccagcggaagaaacagcttctgggctgcctgatagacagtggagccttgcctgatggtcttcaggagagccaggagaggccagttgtcacgtgcctgaaacatgaggacttcgagttggctttccttctcttgaccaagggcgcagacccccgtgctatttctctcacggaaggtgatactcctttgcatgcagcactccacatctttctagagattaaagctgacattggttttagcttcctcagccatctgttggatctgttttggtccaaccccactgaattcgactacctcaaccccaatgtccaggacagcaatgggaacacgctgatgcacatcctcttccagaagggcatgctaaagcgcgtgaagaagctgttagacctgctggtgaagtttgacatcaacttcaatctgaagaacaaagagggcaaagatgcacggcaccggattaagaagaacgactctctgctcttggcctggaacaaagctctgatggagaacaggaggaggagccggcaggactctgctgcccacctggggaagctctcaaagtccactgcccctggtcacacatctcagctcaagtcccagggttcattcaagtcagtgccatgtggtgccactgccagaacactgcctgaaggaagtgcagtccctgacagctgggagactctcccaggtacccaggtgaccaggaaggagcctggagctctcaggccctgctcgctgagagactgccttatgcaggacatcacagttttgattcagcaggttgaagtggatccgtctttcccagaggactgtcttcagagctctgagcctctggaggcaggagctggcaaagaaggaaagaaagatgacaagccgactctgggtgcaggggcccctgactgtagtgaggtgggggaaggacatgctcaggtgggccttggggccttgcagcttgtgcctgatgataacagggggaaggagggcaatgatgatcaggatgactggagcacgcaggagattgaggcctgcctccaggacttcgataacatgacctgggagatcgagtgcacttcagaaatgctgaagaagctgtctagtaaggtaatgaccaaggtcatcaagaagaaaatcatccttgccattcagcagctgggaaatggcgagtggacccagggcctgcagaagcgactgaagcacctgaaaggaagcatccagctcttcgaagctaagctggacaaaggagcccggatgctctgggagctcgccattgacttctcccctcgatgcagtgagaaccctgagaagatcattgccacggagcagaacacgtgtgcaatggagaaatcagggcggatctacacggaaatcatccggatttgggacatcgtcttagatcactgcaaactggctgattccatcaaggccatctgcaatgcctacaaccggggcttgtcctgtgtcctgcggaagaagctgaaaggtatcaataaaggccaagtgtcagctaacatgaaaattcaaaagcgtatacctcgctgctatgtggaggacacagaggccgagaagggcagggagcatgtcaatcctgagtactttcccccagccagtgcagtggagacagaatataacatcatgaagttccacagcttcagcaccaacatggcctttaacatcctcaatgacacgacagccacagtggagtaccccttccgggtgggtgagcttgagtacgcggtgatcgacctcaatcccaggccactggagcccatcatccttattgggcgaagtggcactgggaagacaacctgctgcttgtacagattgtggaagaaattccacgtttactgggaaaaagctgagcaggcaggaagcccattgctggccaaacaggtctggctgaagagaaggttggaagtggaacccggaaaagagagtccaggtggggaggaagaggaggaggaagaggacgaggaagaggaagattctattgaagtggaaacagtagaaagcatagatgagcaggagtatgaagcctgcgcaggaggagccggtgtggagccagcaggggacggccaagctgcagaagtatgtgcaccagaacatccccaccagctggagcatttacatcagatctttgtgaccaagaaccatgtgctgtgccaggaggtacaaaggaatttcattgagctttccaagtccaccaaggccactagtcattacaaaccactggaccccaacattcacaaactccaggacctgagggacgagaactttcctctgtttgtcacttccaagcagctgcttcttctgcttgatgcttctctgcccaaaccattttttctgagaaacgaagatggaagcttgaaaagaaccatcataggatggtctgcacaggaagagtcaaccattcctagttggcaagaggatgaagaggaggctgaggtggatggggactacagtgaggaggataaagctgtagaaatgcgtacgggtgacagtgacccccgggtgtacgtgacgtttgaggtgttcaaaaatgaaatatggcccaaaatgaccaaagggaggactgcctacaaccctgcactgatttggaaagaaataaaatcttttctaaagggttcttttgaggccctcagctgtccccatgggagactcactgaagaagtatataagaaattagggaggaaacggtgccccaatttcaaggaagaccggagtgagatctacagcctcttcagtctgtatcagcaaatcaggtcccagaaaggttattttgatgaagaggatgttctgtacaacatatcccggaggctgtcgaagctcagggtgctcccatggtccatccacgagctctatggtgatgagattcaagactttacccaggccgagctggcgctgctgatgaaatgcatcaatgaccccaactctatgttcctcacgggggacacggcccagagcatcatgaagggcgtggccttccgcttcagcgatctgcgctctctgttccattatgccagcagaaacaccatagacaagcagtgtgctgtccggaagcccaagaagatccaccagctgtaccagaattacaggtcccactcaggaatcctcaatctggcatctggagtggtggatttacttcagttctatttcccagaatcttttgatcgccttccaagggattctggcctctttgatggtcctaagccaactgttctggagtcttgtagtgtaagcgacttggcaattttgctacgagggaataaaaggaaaactcagcccattgaatttggagcccaccaggtaatccttgtggccaatgaaacggcaaaggagaaaattccagaagagctggggttagcacttgtgctaacaatttatgaagcaaaaggcttagaatttgatgatgtcctcctttacaacttttttactgattctgaggcttataaggaatggaagatcatttcctcattcacacctacctcaactgactccagagaggaaaaccggccattggttgaagtacccctggacaaaccaggctcttctcagggtcgatctctcatggtgaatccagaaatgtacaagctcctcaacggagagctgaagcagctgtacaccgccatcacacgggctcgggtcaacctctggatctttgatgaaaaccgagagaaacgggctcccgcattcaaatatttcattagaagagattttgtccaagttgtaaagacagatgaaaataaagactttgatgatagcatgttcgttaagacctcaactcctgcggagtggattgcacagggagattactacgccaagcaccagtgctggaaggttgcagccaagtgttaccagaaaggaggtgcatttgagaaggagaagttggccctggcccatgacactgccctgagcatgaaatccaagaaagtcagccccaaggaaaagcagttggaatatttggaattggctaagacctatttggagtgcaaagagccaacactgtcccttaagtgtctgagctatgccaaggagttccagctctctgcccagctgtgcgagaggctgggaaagataagagatgctgcctatttctataagcgaagccagtgctacaaagacgctttcagatgctttgagcagattcaggaatttgatctagcactcaaaatgtactgccaagaggagctttttgaagaagctgctattgcagtggaaaagtatgaagaaatgctaaagactaagacccttcccatttccaagctctcctattctgccagtcagttttacttggaagctgcagcaaagtatctgagtgcaaataagatgaaggaaatgatggctgtcctctcaaagctagacatagaagaccagctggtgttcttgaagtctcggaaacgcttagcagaagctgcagacctgctgaacagggaaggtaggagagaagaggctgccctgctgatgaagcaacatggctgcctcctggaggctgccaggctcactgccgacaaggacttccaggcctcatgtctgctgggggccgcccgcctcaatgtggccagggattccgacatagaacacaccaaggacattctgagagaagcacttgatatctgctatcaaactggccagttgtctggcattgcggaggcccacttcctgcaaggggtaatcctgagagactttcagaagctcagggatgccttcttcaagtttgacacgctcaaccactcagctggagtggtggaagcactctacgaagcagccagccagtgtgaggccgagcctgagaagattctgggcctggctccagggggcttggaaatcctcctcagtctggtcagggctctcaaaagagtgaccaacaatgctgagaaggaaatggtcaaatcttgctttgagttttttgggatttcccaggtggatgccaagtattgccagatagctcagaatgaccctgggcccatattaagaataatttttgacctggatttgaacttgagagagaaaaaaacaaaagatcattttttgataatgactgaccaagtgaaattagccctaaacaaacaccttttgggcaggctgtgtcagatcacacggagcctgcttgggaagacctaccgaggagtctgcatgaggtttattgtaggcttaaaatgtgaggatgaaaactgtgaacattttcacaggcctctgcggcgttgtgaagccaagtgtttagttcagtcgaaaatgaacttggtggcaatcaacgggttgcttttggaagccaaaaaagtattccctaaaatcttagcagaagaacttaaagaaattgattatattttgtctacagatatgtatggcctttgcaagtccattctggatgtccttttccctaagcatttccatcagagagtgttgtcagaaaaccccatggcatgcaaagaaatcctcaaaccaaattacaaatccttccggttctacagatttgctttgaaggagtacatccactttctgtttgaaaatgaaagcgcacgcaaccgccgggaatccacagacctgtggctgagtgccatgcaagctttccttctctcttccaactacccggaggagtttgaaaagctgctccaccaggaggaggacaactacaacagggaactcaaagctctagagtctgaaaaggatgaaaggggcagggggagaggcagcaggataaaaggaatagaagggaaatttggcatgctggcacccaacagggatgatgaaaatatggacaagacccacctgtgcttcatccggcttctggagaattgcattgatcaattctacgtgtacaggaacccagaagactacaagaggctctttttccgtttcatgaatgtcctcatcaagaggtgcaaagaaccactcatccccagcattggaaacacagtagccctcctggagttccagttcatccactgtggggtggtgctggcccgcctctggaagaatgtcattctatgcctccccaagagctacattgcactcttgcactactgggagttcctgtttagcaagaaggacaaggagcttggggatgtgttctccatcattcaggaatacaaacccaaggacgtgacaagagccattcaggatttccggttccatctctcctacctcgccaaggtgctatgtggctatgagaatgtgaacttcaacgtcctgcttgatgccttcagtgaaatagactatgtggtctcgggtgaggctgagcggacactggtgctgtgcttggtgatgctagtgaatgctgaggagatcctgcagccatactgcaagcctctcctgtatcgccacttccgggagattgagtcaaggctgcagctcatgagcatggactgccctggccaggttcccgagaggctcctgaaggtggtgaagcgggtcttggtggcagtcaatgtgaagtctgtggctgaggcactgcaggacctgctctttgagcgggatgaagagtacctaatggactgtgactggcggtgggaccctgtgcacaccaaagggtccatagtccgtggcctctattatgaggaggtcagactaaaccgcctgctctgtttggaccctgtggactactttgctgaacctgagtgtgagtttggccaggatgagatggatgaactggcattagaagaccgagaccacgtcctggccaccattctttcccaaaagcaacggaaggcctccatacagcggaagttgaggagggcatgcctggtggtgtctctgtgcatcagttggaggagaagagtgggcacccagatggagcgtgtcagggaggaggccagggagcccagggctgggaacttcaaaaaggcagacgtggacaggacccagtgtgacctatgtggagtgaagtttacccgtggcccagagaactatttcagccccagcaaagcgtttgagggggcagcttccgaggtggcagtcctttccagggctgagctggaaagggaggagtgtcaggagaggaacagcgagtcttacgagcagcatatccatctagaacaccaccagaggcagcaagtggcctaccagaaatactcagaatttttccacgagaaggtggacccggccattgatgaaggcaagctggtggtgcaggacatcgagcaaagtgtatggatccacagtcacgtgggctccaaggagcacagccacatgctgcagaaggtccaggagcacatcaagagggtttcggatatggtggaggacctctacaggcggaaggcctgggctggcgcggaggaggcgatgactcggctggtcaacattctgatcctgtcagtcagggatgcacgagactggttgatgaaaacagagacccgcttaaagaaggaaggtattgttcaggaagatgattatgaaaatgaagttgaagactttggtgagcttcggcctagaaggcgttctcggaaatgtggaaagcagagaaaatactaatgtccacacagctgcagcctcctcatccttcggaacattccattctgacttagaattctgagcgctggggcagaagacaaaaagaatgtgaattagcattttaaaaataggggagtctaacaacaccattgctttttattctcattacttctctttcagtggcttaggatctgattgctccctcacctctaaagtgtttccaagtagagtctggcagtattagtttcccccacaaacaaattcaggtagagaagttgtagtcgaagggaatgttgggactcctcactgcatggtccctggggtgtctggctcatccccatcatgacatgagttggtagcagaggactaggtgttaggacagactctcctcacctcagttgctgctgctctgggccaggaaatctctctatggattccctcatctcctgccacactgctgcagcatcaagtgtgctatgagagctgtatgtgcccaggggtgggccctgccactggccaccccgagcccaggacgcattctggtcatctctgagcccacttgtagtgtagcttcttctgttagagatgttagccttttctctctgtggcgacttttctgccttcccttcttctgttttttgtgatcattcttagctacctgtgccaagtcacagttagactacctcagaatgtagtcaagaattcacccagtgttctttggatgtcccttccctagggggaaaggctggggaatgttgctgggagcattcccagctgcctctccaaagtggtcctaactctgccttggctatggtgcagacattccaaaaagtgttttgtatacagccctgtacatctagttttcttggttctccctggcaagttcgctaccctagcttaggctgacgttctgatgagtctctgcttgctgagctcatcactgtgggatggtgacctgcagagctgcagattggagcaagtggacagaggagggagccagctaagccaaatccgtcactgccacttggctggcaggccttataagagggcggatctgggcccgtttgcaggaggccattgcctaccctctccccacagtgagccagcagccatcagctgatcccacctgggaaaccttcatgcctctctgatggttactgcccacccttaccccacccctcagctcagcctggtatggaaagcaaggtgcacgttggtctttgattgttctgtcctcacagcagagccagctttccccccatgttgctgctgcttttgctgctcatgctgcttgttgttttctcttccttatctttccaaattgtttccttgaaatgcttgtttccaatttttcttagattatgtttctaatttttattccaggtgtttttttttcttacttgacagaaaaaaagaaaaccccaacaatatcttgctgtattatcacattttttataaagttaaagcatttctcttacaaaaaaaaaaaaaaaa

SEQ ID NO: 614 - DNA, 2684 bp, HOMO SAPIENS
cccgagaggagtcggtggcagcggcggcggcgggaccggcagcagcagcagcagcagcagcagcaaccactagcctcctgccccgcggcgctgccgcacgagccccacgagccgctcaccccgccgttctcagcgctgcccgaccccgctggcgcgccctcccgccgccagtcccggcagcgccctcagttgtcctccgactcgccctcggccttccgcgccagccgcagccacagccgcaacgccacccgcagccacagccacagccacagccccaggcatagccttcggcacagccccggctccggctcctgcggcagctcctctgggcaccgtccctgcgccgacatcctggaggttgggatgctcttgtccaaaatcaactcgcttgcccacctgcgcgccgcgccctgcaacgacctgcacgccaccaagctggcgcccggcaaggagaaggagcccctggagtcgcagtaccaggtgggcccgctactgggcagcggcggcttcggctcggtctactcaggcatccgcgtctccgacaacttgccggtggccatcaaacacgtggagaaggaccggatttccgactggggagagctgcctaatggcactcgagtgcccatggaagtggtcctgctgaagaaggtgagctcgggtttctccggcgtcattaggctcctggactggttcgagaggcccgacagtttcgtcctgatcctggagaggcccgagccggtgcaagatctcttcgacttcatcacggaaaggggagccctgcaagaggagctggcccgcagcttcttctggcaggtgctggaggccgtgcggcactgccacaactgcggggtgctccaccgcgacatcaaggacgaaaacatccttatcgacctcaatcgcggcgagctcaagctcatcgacttcgggtcgggggcgctgctcaaggacaccgtctacacggacttcgatgggacccgagtgtatagccctccagagtggatccgctaccatcgctaccatggcaggtcggcggcagtctggtccctggggatcctgctgtatgatatggtgtgtggagatattcctttcgagcatgacgaagagatcatcaggggccaggttttcttcaggcagagggtctcttcagaatgtcagcatctcattagatggtgcttggccctgagaccatcagataggccaaccttcgaagaaatccagaaccatccatggatgcaagatgttctcctgccccaggaaactgctgagatccacctccacagcctgtcgccggggcccagcaaatagcagcctttctggcaggtcctcccctctcttgtcagatgcccgagggaggggaagcttctgtctccagcttcccgagtaccagtgacacgtctcgccaagcaggacagtgcttgatacaggaacaacatttacaactcattccagatcccaggcccctggaggctgcctcccaacagtggggaagagtgactctccaggggtcctaggcctcaactcctcccatagatactctcttcttctcataggtgtccagcattgctggactctgaaatatcccgggggtggggggtgggggtgggtcagaaccctgccatggaactgttttcttcatcatgagttctgctgaatgccgcgatgggtcaggtaggggggaaacaggttgggatgggataggactagcaccattttaagtccctgtcacctcttccgactctttctgagtgccttctgtggggactccggctgtgctgggagaaatacttgaacttgcctcttttacctgctgcttctccaaaaatctgcctgggttttgttccctatttttctctcctgtcctccctcaccccctccttcatatgaaaggtgccatggaagaggctacagggccaaacgctgagccacctgcccttttttctgcctcctttagtaaaactccgagtgaactggtcttcctttttggtttttacttaactgtttcaaagccaagacctcacacacacaaaaaatgcacaaacaatgcaatcaacagaaaagctgtaaatgtgtgtacagttggcatggtagtatacaaaaagattgtagtggatctaatttttaagaaattttgcctttaagttattttacctgtttttgtttcttgttttgaaagatgcgcattctaacctggaggtcaatgttatgtatttatttatttatttatttggttcccttcctattccaagcttccatagctgctgccctagttttctttcctcctttcctcctctgacttggggaccttttgggggagggctgcgacgcttgctctgtttgtggggtgacgggactcaggcgggacagtgctgcagctccctggcttctgtggggcccctcacctacttacccaggtgggtcccggctctgtgggtgatggggaggggcattgctgactgtgtatataggataattatgaaaagcagttctggatggtgtgccttccagatcctctctggggctgtgttttgagcagcaggtagcctgctggttttatctgagtgaaatactgtacaggggaataaaagagatcttatttttttttttatacttggcgttttttgaataaaaaccttttgtcttaaaaaaaaaaaaaaaaaaaaaaaaaaaaaaaaaaaaaaaaaaaa

SEQ ID NO: 615 - DNA, 2808 bp, HOMO SAPIENS
tggcaccgagcgagccgcgatgacaatggctgcattgtgcttcatgtcccttcccatcaacatttctgtgctggactccttccactcgcgggtcgtctccagagctcagaaaatgaggtgatcagtgggacgagtaaggaaggggggttgggagaggggcgattgggcaacccggctgcacaaacacgggaggtcaaagattgcgcccagcccgcccaggccgggaatggaataaagggacgcggggcgccggaggctgcacagaagcgagtccgactgtgctcgctgctcagcgccgcacccggaagatgaggctcgccgtgggagccctgctggtctgcgccgtcctggggctgtgtctggctgtccctgataaaactgtgagatggtgtgcagtgtcggagcatgaggccactaagtgccagagtttccgcgaccatatgaaaagcgtcattccatccgatggtcccagtgttgcttgtgtgaagaaagcctcctaccttgattgcatcagggccattgcggcaaacgaagcggatgctgtgacactggatgcaggtttggtgtatgatgcttacctggctcccaataacctgaagcctgtggtggcagagttctatgggtcaaaagaggatccacagactttctattatgctgttgctgtggtgaagaaggatagtggcttccagatgaaccagcttcgaggcaagaagtcctgccacacgggtctaggcaggtccgctgggtggaacatccccataggcttactttactgtgacttacctgagccacgtaaacctcttgagaaagcagtggccaatttcttctcgggcagctgtgccccttgtgcggatgggacggacttcccccagctgtgtcaactgtgtccagggtgtggctgctccacccttaaccaatacttcggctactcgggagccttcaagtgtctgaaggatggtgctggggatgtggcctttgtcaagcactcgactatatttgagaacttggcaaacaaggctgacagggaccagtatgagctgctttgcctggacaacacccggaagccggtagatgaatacaaggactgccacttggcccaggtcccttctcataccgtcgtggcccgaagtatgggcggcaaggaggacttgatctgggagcttctcaaccaggcccaggaacattttggcaaagacaaatcaaaagaattccaactattcagctctcctcatgggaaggacctgctgtttaaggactctgcccacgggtttttaaaagtcccccccaggatggatgccaagatgtacctgggctatgagtatgtcactgccatccggaatctacgggaaggcacatgcccagaagccccaacagatgaatgcaagcctgtgaagtggtgtgcgctgagccaccacgagaggctcaagtgtgatgagtggagtgttaacagtgtagggaaaatagagtgtgtatcagcagagaccaccgaagactgcatcgccaagatcatgaatggagaagctgatgccatgagcttggatggagggtttgtctacatagcgggcaagtgtggtctggtgcctgtcttggcagaaaactacaataagagcgataattgtgaggatacaccagaggcagggtattttgctgtagcagtggtgaagaaatcagcttctgacctcacctgggacaatctgaaaggcaagaagtcctgccatacggcagttggcagaaccgctggctggaacatccccatgggcctgctctacaataagatcaaccactgcagatttgatgaatttttcagtgaaggttgtgcccctgggtctaagaaagactccagtctctgtaagctgtgtatgggctcaggcctaaacctgtgtgaacccaacaacaaagagggatactacggctacacaggcgctttcaggtgtctggttgagaagggagatgtggcctttgtgaaacaccagactgtcccacagaacactgggggaaaaaaccctgatccatgggctaagaatctgaatgaaaaagactatgagttgctgtgccttgatggtaccaggaaacctgtggaggagtatgcgaactgccacctggccagagccccgaatcacgctgtggtcacacggaaagataaggaagcttgcgtccacaagatattacgtcaacagcagcacctatttggaagcaacgtaactgactgctcgggcaacttttgtttgttccggtcggaaaccaaggaccttctgttcagagatgacacagtatgtttggccaaacttcatgacagaaacacatatgaaaaatacttaggagaagaatatgtcaaggctgttggtaacctgagaaaatgctccacctcatcactcctggaagcctgcactttccgtagaccttaaaatctcagaggtagggctgccaccaaggtgaagatgggaacgcagatgatccatgagtttgccctggtttcactggcccaagtggtttgtgctaaccacgtctgtcttcacagctctgtgttgccatgtgtgctgaacaaaaaataaaaattattattgattttatatttcaaaaactccattctttcctaaatattttcaacaaaggatttctttatgcattctgcctaaatacctatgcaactgagcccttccttctcagctcaagattcgtctggtctttccctacagctttgtgtgtgccatggccacatctcctgggtacagttcaaggagacatcttttctaaaagggtctgcgtgatcattaaaatataatcaaatgtaaaaaaaaaaaaaaaaaa

SEQ ID NO: 616 - DNA, 4082 bp, HOMO SAPIENS
ggcggtcccctgttctccccgctcaggtgcggcgctgtggcaggaagccaccccctcggtcggccggtgcgcggggctgttgcgccatccgctccggctttcgtaaccgcaccctgggacggcccagagacgctccagcgcgagttcctcaaatgttttcctgcgttgccaggaccgtccgccgctctgagtcatgtgcgagtgggaagtcgcactgacactgagccgggccagagggagaggagccgagcgcggcgcggggccgagggactcgcagtgtgtgtagagagccgggctcctgcggatgggggctgcccccggggcctgagcccgcctgcccgcccaccgccccgccccgcccctgccacccctgccgcccggttcccattagcctgtccgcctctgcgggaccatggagtggtagccgaggaggaagcatgctggccgtcggctgcgcgctgctggctgccctgctggccgcgccgggagcggcgctggccccaaggcgctgccctgcgcaggaggtggcgagaggcgtgctgaccagtctgccaggagacagcgtgactctgacctgcccgggggtagagccggaagacaatgccactgttcactgggtgctcaggaagccggctgcaggctcccaccccagcagatgggctggcatgggaaggaggctgctgctgaggtcggtgcagctccacgactctggaaactattcatgctaccgggccggccgcccagctgggactgtgcacttgctggtggatgttccccccgaggagccccagctctcctgcttccggaagagccccctcagcaatgttgtttgtgagtggggtcctcggagcaccccatccctgacgacaaaggctgtgctcttggtgaggaagtttcagaacagtccggccgaagacttccaggagccgtgccagtattcccaggagtcccagaagttctcctgccagttagcagtcccggagggagacagctctttctacatagtgtccatgtgcgtcgccagtagtgtcgggagcaagttcagcaaaactcaaacctttcagggttgtggaatcttgcagcctgatccgcctgccaacatcacagtcactgccgtggccagaaacccccgctggctcagtgtcacctggcaagacccccactcctggaactcatctttctacagactacggtttgagctcagatatcgggctgaacggtcaaagacattcacaacatggatggtcaaggacctccagcatcactgtgtcatccacgacgcctggagcggcctgaggcacgtggtgcagcttcgtgcccaggaggagttcgggcaaggcgagtggagcgagtggagcccggaggccatgggcacgccttggacagaatccaggagtcctccagctgagaacgaggtgtccacccccatgcaggcacttactactaataaagacgatgataatattctcttcagagattctgcaaatgcgacaagcctcccaggttcaagaagacgtggaagctgcgggctctgaaggaaggcaagacaagcatgcatccgccgtactctttggggcagctggtcccggagaggcctcgacccaccccagtgcttgttcctctcatctccccaccggtgtcccccagcagcctggggtctgacaatacctcgagccacaaccgaccagatgccagggacccacggagcccttatgacatcagcaatacagactacttcttccccagatagctggctgggtggcaccagcagcctggaccctgtggatgataaaacacaaacgggctcagcaaaagatgcttctcactgccatgccagcttatctcaggggtgtgcggcctttggcttcacggaagagccttgcggaaggttctacgccaggggaaaatcagcctgctccagctgttcagctggttgaggtttcaaacctccctttccaaatgcccagcttaaaggggctagagtgaacttgggccactgtgaagagaaccatatcaagactctttggacactcacacggacactcaaaagctgggcaggttggtgggggcctcggtgtggagaagcggctggcagcccacccctcaacacctctgcacaagctgcaccctcaggcaggtgggatggatttccagccaaagcctcctccagccgccatgctcctggcccactgcatcgtttcatcttccaactcaaactcttaaaacccaagtgccttagcaaattctgtttttctaggcctggggacggcttttacttaaaccgccaaggctgggggaagaagctctctcctccctttcttccctacagttgaaaaacagctgagggtgagtgggtgaataatacagtatctcagggcctggtcgttttcaacagaattataattagttcctcattagcattttgctaaatgtgaatgatgatcctaggcatttgctgaatacagaggcaactgcattggctttgggttgcaggacctcaggtgagaagcagaggaaggagaggagaggggcacagggtctctaccatcccctgtagagtgggagctgagtgggggatcacagcctctgaaaaccaatgttctctcttctccacctcccacaaaggagagctagcagcagggagggcttctgccatttctgagatcaaaacggttttactgcagctttgtttgttgtcagctgaacctgggtaactagggaagataatattaaggaagacaatgtgaaaagaaaaatgagcctggcaagaatgtgtttaaacttggtttttaaaaaactgctgactgttttctcttgagagggtggaatatccaatattcgctgtgtcagcatagaagtaacttacttaggtgtgggggaagcaccataactttgtttagcccaaaaccaagtcaagtgaaaaaggaggaagagaaaaaatattttcctgccaggcatggtggcccacgcacttcgggaggtcgaggcaggaggatcacttgagtccagaagtttgagatcagcctgggcaatgtgataaaaccccatctctacaaaaagcataaaaattagccaagtgtggtagagtgtgcctgaagtcccagatacttggggggctgaggtgggaggatctcttgagcctgggaggtcaaggctgcagtgagccgagattgcaccactgcactccagcctgggtgacagagcaagtgagaccctgtctcaaaaaaagaaaaagaaaaagaaaaaatattttccctattagagaagagattgtggtttcattctgtattttgtttttgtcttaaaaagtggaaaaatagcctgcctcttctctactctagggaaaaaccagcgtgtgactactcccccaggtggttatggagagggtgtccggtccctgtcccagtgccgagaaggaagcctcccacgactgcccggcagggtcctagaaattccccaccctgaaagccctgagctttctgctatcaaagaggttttaaaaaaatcccatttaaaaaaaatcccttacctcggtgccttcctctttttatttagttccttgagttgattcagctctgcaagaattgaagcaggactaaatgtctagttgtaacaccatgattaaccacttcagctgacttttctgtccgagctttgaaaattcagtggtgttagtggttacccagttagctctcaagttatcagggtattccagagtggggatatgatttaaatcagccgtgtaaccatggacccaatatttaccagaccacaaaacttttctaatactctaccctcttagaaaaaccaccaccatcaccagacaggtgcgaaaggatgaaagtgaccatgttttgtttacggttttccaggtttaagctgttactgtcttcagtaagccgtgattttcattgctgggcttgtctgtagattttagaccctattgctgcttgaggcaactcatcttaggttggcaaaaaggcaggatggccgggcgcggtggctcacgcctgtaatcctagcactttgggaggccaaggtgggaggattgcttgagctcaggagtttgagaccaacctggg

SEQ ID NO: 617 - DNA, 4045 bp, HOMO SAPIENS; identical to SEQ ID NO: 143

SEQ ID NO: 618 - DNA, 1936 bp, HOMO SAPIENS
cctcgctagtggcgggcatgataacacacgccggagggtcgcacgcgggttccagttgtgattgctggagttgtgtattgccaggaggctctccgagattggggtcgggtcactgcctcatccaccggagcgatggcgtttctccgaagcatgtggggcgtgctgagtgccctgggaaggtctggagcagagctgtgcaccggctgtggaagtcgactgcgctcccccttcagttttgtgtatttaccgaggtggttttcatctgtcttggcaagttgtccaaagaaacctgtaagttcttaccttcgattttctaaagaacaactacccatatttaaagctcagaacccagatgcaaaaactacagaactaattagaagaattgcccagcgttggagggaacttcctgattcaaagaaaaaaatatatcaagatgcttatagggcggagtggcaggtatataaagaagagataagcagatttaaagaacagctaactccaagtcagattatgtctttggaaaaagaaatcatggacaaacatttaaaaaggaaagctatgacaaaaaaaaaagagttaacactgcttggaaaaccaaaaagacctcgttcagcttataacgtttatgtagctgaaagattccaagaagctaagggtgattcaccgcaggaaaagctgaagactgtaaaggaaaactggaaaaatctgtctgactctgaaaaggaattatatattcagcatgctaaagaggacgaaactcgttatcataatgaaatgaagtcttgggaagaacaaatgattgaagttggacgaaaggatcttctacgtcgcacaataaagaaacaacgaaaatatggtgctgaggagtgttaaaagtagaagattgagatgtgttcacaatggataggcacaggaaaccagttaggtctcaatacctgaagctatcgtaaaattaagaaaggataaagttggtaaaccttttatatttagtatctttttattcagctcatggacttctgccagcataatacttgctttggaaaacccagataaaggttcatgcaaactttattttgtgtttaggaactactgaggatcagagtaatccaagcaaatgtgaatcattttacctttgacaaaggtaaatcagactatgaagttttttttatacaggatgatgactatggaaagagtactcttgtttccttatattatggaggcaggagtttcgttttcaaaattgttacaaattgtagaagccacggtgttctgtgatataagtgtgtgtttttcataaagcaggcagaactcatctaggtaaattacagttcctaggtataattcacattgtattcagagttgatggttgtacatataagtgattgctggttttagttgcaactttgtataaaagggactgagaaatttataaacttttttcttactgtcttttttctaaagtaaaaacaaagaaattatgtgccagatttatgcatattattttatgttgcatagaataaaatttttaatctttaattttacatttcctaaatatattttaagacgaaacatttgttctatagcttttccctttttttaagtaaggaattttatttttttctgaattattttctctcgtgagtatattgatccagaaagaaaacttgtattatgtgtgttttaaaatgagaaatctaaaaaacgaaaagtctccaaagtctctggaatttgaaacactttgcataacgtataaaagcctgtttaagagacagccaactatggcctgtggatcaaatccagcctgctgcctgctttttatggcctgtgagctaggaattgtgtttataattttaaatgtttttttttaaagacttttatgatacttgaaaattaacatgaatatttagtgttcataaataaagtttgttgaaacaca

SEQ ID NO: 619 - DNA, 3274 bp, HOMO SAPIENS
tgctccctcccctcctagctggcttcggcggggacggcggcggcggcggcgggcggggagggcgtgcgccggccgagaggtgtcggcggcgaggcaaaggaagtttcaagtggaaggtcgtccgtcggccggcgcgtcctcctgctctcctccgcagcatcatggcggagccgagcggctcgcccgtgcacgtccagcttccccagcaggcggccccggtgacagcggcggcggcggcggccccggcggccgcgacagcagcgccggccccggcagctcccgcggccccggccccggccccggccccggcggcacaggctgtcggctggcccatctgcagggacgcgtacgagctgcaggaggttatcggcagtggagctactgctgtggttcaggcagccctatgcaaacccaggcaagaacgtgtagcaataaaacggatcaacttggaaaaatgccagaccagtatggatgaactattaaaagaaattcaagccatgagtcagtgcagccatcccaacgtagtgacctattacacctcttttgtggtcaaagatgaactttggctggtcatgaaattactaagtggaggttcaatgttggatatcataaaatacattgtcaaccgaggagaacacaagaatggagttctggaagaggcaataatagcaacaattcttaaagaggttttggaaggcttagactatctacacagaaacggtcagattcacagggatttgaaagctggtaatattcttctgggtgaggatggttcagtacaaatagcagattttggggtaagtgcgttcctagcaacagggggtgatgttacccgaaataaagtaagaaaaacattcgttggcaccccatgttggatggctcctgaagtcatggaacaggtgagaggctatgacttcaaggctgacatgtggagttttggaataactgccattgaattagcaacaggagcagcgccttatcacaaatatcctcccatgaaagtgttaatgttgactttgcaaaatgatccacccactttggaaacaggggtagaggataaagaaatgatgaaaaagtacggcaagtcctttagaaaattactttcactgtgtcttcagaaagatccttccaaaaggcccacagcagcagaacttttaaaatgcaaattcttccagaaagccaagaacagagagtacctgattgagaagctgcttacaagaacaccagacatagcccaaagagccaaaaaggtaagaagagttcctgggtcaagtggtcaccttcataaaaccgaagacggggactgggagtggagtgacgacgagatggatgagaagagcgaagaagggaaagcagctttttctcaggaaaagtcacgaagagtaaaagaagaaaatccagagattgcagtgagtgccagcaccatccccgaacaaatacagtccctctctgtgcacgactctcagggcccacccaatgctaatgaagactacagagaagcttcttcttgtgccgtgaacctcgttttgagattaagaaactccagaaaggaacttaatgacatacgatttgagtttactccaggaagagatacagcagatggtgtatctcaggagctcttctctgctggcttggtggatggtcacgatgtagttatagtggctgctaatttacagaagattgtagatgatcccaaagctttaaaaacattgacatttaagttggcttctggctgtgatgggtcggagattcctgatgaagtgaagctgattgggtttgctcagttgagtgtcagctgatgtatgtcccttgatgtcaccctgatctgtcatgccccaccgccacccctactcccttcaaccctccctctttctgcccatttcctcccaccccctcactcccatttcctagcaaaatcagaagattgtgaagaggccggcttcaacaaaatgggataaaaaaataattttttaaaacttacaacactccgagttctgctttattctctagcaatccacagtacaagaacaagcaaatgccacagctgcacgactgttgctcatttttccaaaagctatttaatattcttagcaatcaatttggatatcccttaagtgaaaagaatctgaaatacactcaggtggtcttatttattggcaacaaaaggaattttctatccagaagcctatttctcctttcattgttgttatttctgttataatactttaattgtacatctgacaatactgcctcttttatgttgtatttagaaattaatatacttataaaattaagatttattagccaaacttgaattctagttttaaaactgactgtgaattttatttttcatatatttatgcattacacaccttagctataagaaaaaaagggttttgattatatgcttcttgcagttaatctcgttatttaaacaaaaagttttgggtctgtctttggagtatttgtaacttctaaattttgaaatgactgaattaggaatttggatgcttattcttttagtctgtttgcctaaaaaccaatttacaatctgactgtctcttgggagagggaggtgccttgcaaactttcacattaagaatgtgcctgaggctgctttactctggaatagtctcagatctaaaatttcctctatataaggtggcatatgttaagttttgcttcattggaccgtttagaatgctatgtaaaatgttgccattctgttagattgctaactatatacccatctctgatttggctctccttaagtgataggatttgttattctaaaggtgataaacttgaaaatatcagaatctgagttttacttgaaattttgcagaatacccaggtggagtgaaaattggaagggttttgtgcaatgactaaaaggtaaaacgctgttaaggttcaagaatcaatactttcaacccaagtagccctctgcttgactgtatattatggaactagtaaaccttaggattttgaaaattggagtctaatctttcaaggaggtgggctcccaggatggtaccattgctctttcctagctaaccctagatatggcagctctttaatgtacttcaaaaagcaaatatatattactaaggaaaaaaagttatttataattgccttgtcataattgttaaggtgttctagagccatttgcatacaatttaatgtaatttcattccattctattgtttacacaacgattactcgaagatgactgcaaaggtaaaaggaaaataaaagtgtattgcacaatgag

SEQ ID NO: 620 - DNA, 2978 bp, HOMO SAPIENS
ggggtgtgtgcggggggccggaggcggcggctgtcagagtcggctcagcctgcgccggggaacatcggccgcctccagctcccggcgcggcccggcccggcccggctcggccgcctcagacgccgcctgccctgcagccatgaggcccccgcagtgtctgctgcacacgccttccctggcttccccactccttctcctcctcctctggctcctgggtggaggagtgggggctgagggccgggaggatgcagagctgctggtgacggtgcgtgggggccggctgcggggcattcgcctgaagacccccgggggccctgtctctgctttcctgggcatcccctttgcggagccacccatgggaccccgtcgctttctgccaccggagcccaagcagccttggtcaggggtggtagacgctacaaccttccagagtgtctgctaccaatatgtggacaccctatacccaggttttgagggcaccgagatgtggaaccccaaccgtgagctgagcgaggactgcctgtacctcaacgtgtggacaccatacccccggcctacatcccccacccctgtcctcgtctggatctatgggggtggcttctacagtggggcctcctccttggacgtgtacgatggccgcttcttggtacaggccgagaggactgtgctggtgtccatgaactaccgggtgggagcctttggcttcctggccctgccggggagccgagaggccccgggcaatgtgggtctcctggatcagaggctggccctgcagtgggtgcaggagaacgtggcagccttcgggggtgacccgacatcagtgacgctgtttggggagagcgcgggagccgcctcggtgggcatgcacctgctgtccccgcccagccggggcctgttccacagggccgtgctgcagagcggtgcccccaatggaccctgggccacggtgggcatgggagaggcccgtcgcagggccacgcagctggcccaccttgtgggctgtcctccaggcggcactggtgggaatgacacagagctggtagcctgccttcggacacgaccagcgcaggtcctggtgaaccacgaatggcacgtgctgcctcaagaaagcgtcttccggttctccttcgtgcctgtggtagatggagacttcctcagtgacaccccagaggccctcatcaacgcgggagacttccacggcctgcaggtgctggtgggtgtggtgaaggatgagggctcgtattttctggtttacggggccccaggcttcagcaaagacaacgagtctctcatcagccgggccgagttcctggccggggtgcgggtcggggttccccaggtaagtgacctggcagccgaggctgtggtcctgcattacacagactggctgcatcccgaggacccggcacgcctgagggaggccctgagcgatgtggtgggcgaccacaatgtcgtgtgccccgtggcccagctggctgggcgactggctgcccagggtgcccgggtctacgcctacgtctttgaacaccgtgcttccacgctctcctggcccctgtggatgggggtgccccacggctacgagatcgagttcatctttgggatccccctggacccctctcgaaactacacggcagaggagaaaatcttcgcccagcgactgatgcgatactgggccaactttgcccgcacaggggatcccaatgagccccgagaccccaaggccccacaatggcccccgtacacggcgggggctcagcagtacgttagtctggacctgcggccgctggaggtgcggcgggggctgcgcgcccaggcctgcgccttctggaaccgcttcctccccaaattgctcagcgccaccgcctcggaggctcccagcacctgcccaggcttcacccatggggaggctgctccgaggcccggcctccccctgcccctcctcctcctccaccagcttctcctcctcttcctctcccacctccggcggctgtgaacacggcctcttcccctacggccacaggggcccctcctctaatgagtggtcggaccgtggggaagggccccactcagggatctcagacctagtgctcccttcctcctcaaaccgagagactcacactggacagggcaggaggagggggccgtgcctcccacccttctcagggacccccacgcctttgttgtttgaatggaaatggaaaagccagtattcttttataaaattatcttttggaacctgagcctgacattggggggaagtgggaggccccggacggggtagcaccccccattggggctataacggtcaaccatttctgtctcttctttttcccccaacctccccctcctgtcccctctgttcccgtcttccggtcattcttttctcctcctctctccttcctgctgtccttctccggccccgcctctgccctcatcctccctctcgtctttcgcacattctcctgatcctcttgccaccgtcccacgtggtcgcctgcatttctccgtgcgtcctccctgcactcatacccccccttcaacccgcccaaatgtccgatccccgaccttcctcgtgccgtcctcccctcccgcctcgctgggcgccctggccgcagacacgctcgacgaggcggagcgccagtggaaggccgagttccaccgctggagctcctacatggtgcactggaagaaccagttcgaccactacagcaagcaggatcgctgctcagacctgtgaccccggcgggacccccatgtcctccgctccgcccggccccctagctgtatatactatttatttcagggctgggctataacacagacgagccccagactctgcccatccccaccccaccccgacgtcccccggggctcccggtcctctgcatgtctcaggctgagctccctcccccgcggtgccttcgcccctctgggctgccaataaactgttacagccaaaaaaaaaaaaaaaaaaaaaa

SEQ ID NO: 621 - DNA, 1730 bp, HOMO SAPIENS
gcagagagggagcgcgccttggctcgctggccttggcggcggctcctcaggagagctggggcgcccacgagaggatccctcacccgggtctctcctcagggatgacatcatccgtccacctccttgtcttcaaggaccacctcctctccatgctgagctgctgccaaggggcctgctgcccatctacacctcacgagggcactaggagcacggtttcctggatcccaccaacatacaaagcagccactcactgacccccaggaccaggatggcaaaggatgaagaggaccggaactgaccagccagctgtccctcttacctaaagacttaaaccaatgccctagtgagggggcattgggcattaagccctgacctttgctatgctcatactttgactctatgagtactttcctataagtctttgcttgtgttcacctgctagcaaactggagtgtttccctccccaagggggtgtcagtctttgtcgactgactctgtcatcacccttatgatgtcctgaatggaaggatccctttgggaaattctcaggagggggacctgggccaagggcttggccagcatcctgctggcaactccaaggccctgggtgggcttctggaatgagcatgctactgaatcaccaaaggcacgcccgacctctctgaagatcttcctatccttttctgggggaatggggtcgatgagagcaacctcctagggttgttgtgagaattaaatgagataaaagaggcctcaggcaggatctggcatagaggaggtgatcagcaaatgtttgttgaaaaggtttgacaggtcagtcccttcccacccctcttgcttgtcttacttgtcttatttattctccaacagcactccaggcagcccttgtccacgggctctccttgcacagccaagcttcttgaaaggcctgtctacacttgctgtcttccttcctcacctccaatttcctcttcaacccactgcttcctgactcgctctactccgtggaagcacgctcacaaaggttcccagtgcccccgacaagcccctgctggtgtctccatctcctgccaagcatcctccagtgcctcctcctgtgggcctggcctcagggctatggacagactcctgtcccatcccagagacccctcgtgatcgtgccctggcacgtgggccgtggcccggctgggtcggctgaagaactgcggatggaagctgcggaagaggccctgatggggcccaccatcccggacccaagtcttcttcctggcgggcctctcgtctccttcctggtttgggcggaagccatcacctggatgcctacgtgggaagggacctcgaatgtgggaccccagcccctctccagctcgaaatccctccacagccacggggacaccctgcacctattcccacgggacaggctggacccagagactctggacccggggcctccccttgagtagagacccgccctctgactgatggacgccgctgacctggggtcagacccgtgggctggacccctgcccaccccgcaggaaccctgaggcctaggggagctgttgagccttcagtgtctgcatgtgggaagtgggctccttcacctacctcacagggctgttgtgaggggcgctgtgatgcggttccaaagcacagggcttggcgcaccccactgtgctctcaataaatgtgtttcctgtcttaacaaaaaaaaaaaaaaaaaaaaaaaa

SEQ ID NO: 622 - DNA, 2738 bp, HOMO SAPIENS
tcgcacttccgtgtgccgcggcgccggagcccgaggcggctgtagcccacatctcccgagcgacccccggcgcccgcccgccgcgcggaggcccgggccacacctcactggccgcttggcccatcccagtcagcgccgcgccgaaccccgtccgcgcgcgccggggagcggcgcccccgccgctgccgccgcgacccttggcgcctgcccctgcaacgggagccccactgcaggccccaccatggcgccgttcctgcgcatcgccttcaactcctatgagctgggctccctgcaggccgaggacgaggcgaaccagcccttctgtgccgtgaagatgaaggaggcgctcagcacagagcgtgggaaaacactggtgcagaagaagccgaccatgtatcctgagtggaagtcgacgttcgatgcccacatctatgaggggcgcgtcatccagattgtgctaatgcgggcagcagaggagccagtgtctgaggtgaccgtgggtgtgtcggtgctggccgagcgctgcaagaagaacaatggcaaggctgagttctggctggacctgcagcctcaggccaaggtgttgatgtctgttcagtatttcctggaggacgtggattgcaaacagtctatgcgcagtgaggacgaggccaagttcccaacgatgaaccgccgcggagccatcaaacaggccaaaatccactacatcaagaaccatgagtttatcgccaccttctttgggcaacccaccttctgttctgtgtgcaaagactttgtctggggcctcaacaagcaaggctacaaatgcaggcaatgtaacgctgccatccacaagaaatgcatcgacaagatcatcggcagatgcactggcaccgcggccaacagccgggacactatattccagaaagaacgcttcaacatcgacatgccgcaccgcttcaaggttcacaactacatgagccccaccttctgtgaccactgcggcagcctgctctggggactggtgaagcagggattaaagtgtgaagactgcggcatgaatgtgcaccataaatgccgggagaaggtggccaacctctgcggcatcaaccagaagcttttggctgaggccttgaaccaagtcacccagagagcctcccggagatcagactcagcctcctcagagcctgttgggatatatcagggtttcgagaagaagaccggagttgctggggaggacatgcaagacaacagtgggacctacggcaagatctgggagggcagcagcaagtgcaacatcaacaacttcatcttccacaaggtcctgggcaaaggcagcttcgggaaggtgctgcttggagagctgaagggcagaggagagtactttgccatcaaggccctcaagaaggatgtggtcctgatcgacgacgacgtggagtgcaccatggttgagaagcgggtgctgacacttgccgcagagaatccctttctcacccacctcatctgcaccttccagaccaaggaccacctgttctttgtgatggagttcctcaacgggggggacctgatgtaccacatccaggacaaaggccgctttgaactctaccgtgccacgttttatgccgctgagataatgtgtggactgcagtttctacacagcaagggcatcatttacagggacctcaaactggacaatgtgctgctggaccgggatggccacatcaagattgccgactttgggatgtgcaaagagaacatattcggggagagccgggccagcaccttctgcggcacccctgactatatcgcccctgagatcctacagggcctgaagtacacattctctgtggactggtggtctttcggggtccttctgtacgagatgctcattggccagtcccccttccatggtgatgatgaggatgaactcttcgagtccatccgtgtggacacgccacattatccccgctggatcaccaaggagtccaaggacatcctggagaagctctttgaaagggaaccaaccaagaggctgggagtgaccggaaacatcaaaatccaccccttcttcaagaccataaactggactctgctggaaaagcggaggttggagccacctttcaggcccaaagtgaagtcacccagagactacagtaactttgaccaggagttcctgaacgagaaggcgcgcctctcctacagcgacaagaacctcatcgactccatggaccagtctgcattcgctggcttctcctttgtgaaccccaaattcgagcacctcctggaagattgaggttcctggacagatcaggctagccctgccctccacccacacctgcccgctccccacgataagcaccagtgggactgtggtgacttctgctgctggccccgcccctgcccccagagcgtccttggctgccgtctggccgggctctcatggtacttcctctgtgaactgtgtgtgaatctgcttttcctctgccttcggagggaaattgtaaatcctgtgtttcattacttgaatgtagttatctattgaaaatatatattatatacatagacatatatatatatataataggctgtatatattgctcagtagagaaaaaccatgggggactggtgatatgttgatctttttcaaaaaaatatatatatgacaaaaaaaaaaaaaaaggagcacaagctgtttgaaccaccaggtttatttgtgtgtctaaataaacaccaaatagtaccaaaaaaaaaaaaaaaaa

SEQ ID NO: 623 - DNA, 7190 bp, HOMO SAPIENS
tatgagccacactgcagttttaagccggaatatctcacggttttattgtttcttccacgaaatgattacataaaatgaaatcagctttgcaatctgcaccggctttgaaatgaagggcaaaatctggctgggggtgaggagaaagaaggtggagagagaataaggtacggagactgtgaggcagagaacgcaggaaaggtggtgaaaagagagtacaagaattttcgggagctgagtgtatttttcttccccatgttatagatgctgtccgttttcccccagcctgtgtccagcaggccagagtggacccctcctatgggctaaaatactctcggtcttcggcccagcacagagctgcaccaaccagggcctgccgctgcccccccaccaggtgacaggtggggccgccgagcggccaccagacctccgcctcctcgcgttgcctgccgggagccggagccgcttccggttgcgccctgtccctgaacttcgactcccgtcggcccccgggaaaaccgcagcggggtagcgcgggcgctgccggaacttgtagttccacctcccgccgcgctaaatagccggaaacgggggcggccagaacagagaactaccgaggcgaagcacctgtggaatcctctcaagaggaacagtcattgtgtgaaggttcaaattcagctgttagcatggaactttcagaacctattgtagaaaatggagagacagaaatgtctccagaagaatcatgggagcacaaagaagaaataagtgaagcagagccagggggtggttccttgggagatggaaggccgccagaggaaagtgcccatgaaatgatggaggaggaagaggaaatcccaaaacctaagtctgtggttgcaccgccaggtgctcctaagaaagagcatgtaaatgtagtattcattgggcacgtagatgctggcaagtcaaccattggaggacaaataatgtatttgactggaatggttgacaaaaggacgcttgaaaagtatgaaagagaagctaaagagaaaaacagagaaacttggtacttgtcttgggccttagacacaaatcaggaagaacgagacaagggtaaaacagtagaagtgggtcgtgcctattttgaaaccgaaaagaagcatttcacaattctagatgcccctggccacaagagttttgtcccaaatatgattggtggtgcctctcaagctgatttggctgtgctggtaatctcagccaggaaaggagagtttgaaactggatttgaaaaaggaggacagacaagagaacatgcaatgttggcaaagacagcaggtgtaaaacacctaattgtgctaattaataagatggatgatccaacagtaaattggagcaatgagagatatgaagaatgtaaggagaaactagtgccatttttgaaaaaagttggcttcaatcccaaaaaggacattcactttatgccctgctcaggacttactggagcaaatctcaaagagcagtcggatttctgtccttggtacattggattaccgtttattccatatctggataatttgccgaacttcaatagatcagttgatggaccaatcaggctgccaattgtggataagtacaaggatatgggcactgtggtcctgggaaagctggaatcaggatctatttgtaaaggccagcagcttgtgatgatgccaaacaagcacaacgtggaagttcttggaatactttccgatgatgtagagactgataccgtagccccaggtgaaaacctcaaaatcagactgaaaggaattgaagaagaggagattcttccagggtttatactttgtgatcctaataatctttgtcattctggacgcacatttgatgcccagatagtgattatagagcacaaatccatcatctgcccaggctataatgcggtgctgcatattcatacctgtattgaggaggtggaaataacagccttaatctgcttggtagacaaaaaatcaggagaaaaaagtaagacccgaccccgttttgtcaaacaagatcaagtatgcattgctcgcttaaggacagcaggaaccatctgccttgagacctttaaagacttccctcagatgggtcgtttcaccttaagagatgagggtaagaccattgcaattggaaaagttctgaaactggttccagagaaagactaagcattttcttgatgaccctgcacaatactgtgaggaaaattgactgcagaagcctacttcacaccgccttctcttattttctgcccattgataaacctctccccatattttgcaaagaggaaattcacagcaaaagtccacattatgtcagctttctcatattgagagctctgctatgccactgttgaatttttcccaagattcctgtccctagccctcacttcaaactctgcttccttggacagatttggcaatagctttgtaagtgatgtggacataattgcctacaataatgaaaacctacaggaatttttttatttttcattttccccttaggcatatttagtatttttcccccaggcagatcattctgagtgtgcgagtgtgtgtgcacatgttacaaaggcaactaccatgttaataaaatattcaatttgaaatccttttcggtatttgaattgcttttgaataatgttttttatctggatgtaacattgttgcattagctttttaactttcccaagtaattgaatacattttattacttggacttttataaactctttccctacccactataaatgagacattcacagcgttcaagtttgtattaaaggaaaggattagtttgaccccttcttttgatggttaatgcatacatgcagttaaatccctttatgcaaatgtgacactgctttactaggtcttttagttatttatttattttttttttttttgccaatttatattgtaacatgatttcttgaacacagtaagttgttttaaaataaaagaacagcatactgtagtttttataagtaaagcgtaatgaaattgtacccctagagaaaattccattaacttgttaaattagtggaattaacaacaaataaagcatgtttgagacctggcaaaaattcctctggtagtatttataaatagagctgcatgcctctagtatgaaaaccgtatcagttgcaagtgccacttctacaagttactcagtttactctttgtatcagtaactttaaaggttggatgatccttgctggttaaagctaaatctcaacctagcaactaaatgaaaatatttagaatcatcagaatctgaacagactaaaattatcagcgataagcagaatcaagcagggtataagttttatctcaattatttgaaattgactgagttttcttaagtgtaaagctgaaatttgctaaccatgtttttgatgaaccacagtgcagcattgtgtgggttttagattgaatgactctctgctataattatcatgactttgaaatttttcatgagaataaatgaggaatggaggcaatttgtgggtttatccaaagcccccttgatgttgagtgttgccattgatcaaagatagcctcttttagattgtgatttctctctaaataagatactttgtatatttaatgacaagtctcttccctataattttgctcctcagaaaagaaaagcctagacagactgtatttccagtcacagaacataaaacttaatctaatgggtgttttgttttgttttgagacagaggctcactctgtcacctaggctggagtgcagtggctcgatctcagctcactgcagcctccacctcccggattcaagcaatttcctgcctcagcctcttgagtagctgggattacaggagccctccacgaggcccagttaatttttgtatctttagtggagacgaggtttccccctattggtcaggctggtctcaaacttctgacctcaagtgatccactcgcctcagcctctcaaaagtgctgggattacaggcatgaggcgccgcacttggcctagtgttttcttaactgtgaaattcccattcatttcttgaatgaggctacatcttatggacagagcaaagttattgtcctacagattcttaaaactataattatggctattgcatgaaatttaaatagattttattatgtctgcaaatctctgggcttttatttttctggaaaatataggagctttaatcaaaacataatagttctttttgtaattccatgttaataaaaacaaatactagcaattgcttgaattttaatgaatatttaaaagttcaagagccacggaaatcacttccagagataagagttccctttctaaatagaacacatttttaaaaaataagttatgtttgctactaaaacatttacactgttagactattatgtgcatgttgccaagactcttaagtaacttggatatcaactgtgaagggcctacctctaaaaagtaacaggtcatacaaatacaaatgtaactgtaaaaattccactggattcttgcatatttgcaagattagattattcaaaagaaatttcagtgctaaaattaaccagcaacataagttctatgggctttgaaaattgttctcatctttttaaagttgatgcattttcaatcctgcttacacaggctgttcatttggataagtaaataaaatgtctaaggtgaacttggcattatgtggagatgttggaccgttatagagcaatacaaattcctatgctgtcattctgttttctgcaaatgcaaacgtgcttatatggtcaacagtgcaaaaatagggtagttggctgcatatttagggtattacctaagcatttgttctctaacgttgctctactagaatgatttttttcttgcatcttttcacattaatgatgttctttatataactttcatgcgattatttagttttttaaattaataaagtgaatttaagaaatattgaaataaacatctaagtaattgccattttaaacccttgtttcttactgtgggagagggggaaatacagcactcatttcttgtttttaatttgcagaagtaagtgaaaatctatgtaaaatcaaaccaaaagagttggactgagtgtgtattgtcttgagattaagtgacaaatagtaaagtgttactgagtaattaagcccatgtattttttttttgtgagttgaaaatctttgaaatatgtgataaccgaatgtcaaaagttcctaaactctaacagtgcaggttgttcactgtaacgaggtaactcatatttgctggttacataaactacaagtactgctctcacaatatgggactttgaactgtgatgtagttcaacagttgccggcatcctctcagctgatacgctgcgaatattttgggttagacttgcagccagatgcagttttgcaacccaagaaaaaagttgaacctatgatcaaaaactgctcccaagatgaacctggaaaaaaatcagctaagctcccttggcgatctgcaggaacactagtaatgactggaattactccgtgatctttgatgactattacacataacagcactctagcaccttttcttactggcatggacttcctcatggactgctacttcatggatgatagcttcattgctttgggtagggatttaaggtagtcaaggggaaaatacgcagttttattacaggtcttaacatcaggcaactttcaactttaaaaccctttgtgaaaaatgtggttatagcactatagctctgattttaggatggttaaatgttatattcattgttggcttaccttatcaaactgtgccattaatcctttcacagacataggtaaggaagagaacaaccagtggattcaggggacaattatctatctccaaataataggcttttatttcttgcagctaactttttcagtgattctagcagatgccatctagtacatccttgatcttgtttctttcgtgagagatctcgccatggcagcatcttgttaagtaagtgtaattgcacatgcacaaaagacttaactagctttacatttagcagtcagttggttagattaggtttcatagtaaatgaataggaatagaaagaataggaagtgtttttattttccagtagtaattccgtggattccatttgacccagtttactatcagttcagttcaggtagatttggttcaacttttggtggtttttggctctaggatattcttgactttaatatcctagaacttactgagtcttcccttcaataaatacacttctcacatacctctaatcctatgcttccttgaaacaataatgctagctgagttgtttactaaggattattataagggcctgaaggtgtgggagtggagattaattaaaacctttatgttctccaatataagggaaaagcaggttggtactacttctgattaggcagaaaacaccaggattccttaagtgatccttgaaatggttattgttttctgccttgtcacatttgccactgtgccctttaaaacgatgtggaaacctcaggtttgtggacagcacaggtggaatgacatcttgtgcttcctgaggctcccctctaccaggcacattagcttagtgcttcagatgtcagcccaagtccttgttacctccttttcctgctgcccagggaagagtgtgtgtgctggagctggagcgcttgcactcttcaggtgactattctcacctccatttcctccacatgcattaggtgaaactgaggtctaagcctcctgcaaggtctacattttaaggactcacacatcaggctctcagaaatgtacacaggtattagttctgtttgttctaaaggaaatgtgggtatctctcaggccaggacttagtgactagttttcgctagacagcaggttaatacctagatctcatttaaaaaaaaaaaaaaaaaacaggattaaagggaactgatcaggtttgttgagttttttagcctaattccaaagcatggaagagtgctctaggtaggaaagaaagctttttcttacgatttgtagctacctactgtgcctgacttggtgcctgtgtgaggattaagcccttagtctgctcttgcaattattcaaatgacaaattaaatttgcttttgtaataacaataaaagttgtcatcttcccttttgaaaaaaaaaaaaaaaaaa

SEQ ID NO: 624 - DNA, 2275 bp, HOMO SAPIENS
cgctcggggggtgggaaagcgagcccggcagctcaatgacaaatcggtggaggacggctggggtccggccccgggagggggcggggcgcgtttaagagctgcgggccgggtgcggacggcggaggcggcgggactggtccctgctcttcagtgggtcatctgtgtgtcacagcctcagaagaccagcgagatggctgccaacaagagtaagggccagagctccttggccctccacaaggtgatcatggttggcagcggaggcgttggcaagtcagccctgacgcttcagttcatgtatgacgagtttgtagaagactatgaacctaccaaagctgacagttatagaaagaaagtggttcttgatggggaagaagttcagatagatattctggacaccgctgggcaagaggactacgcagccattcgagataactactttcggagtggggaagggtttcttcttgtgttctcaatcacagaacatgaatcctttacagcaactgccgaattcagggaacagattctccgtgtgaaggctgaagaagataaaattccactgctcgtcgtgggaaacaagtctgacctagaggagcggaggcaggtgcctgtggaggaggccaggagtaaagccgaagagtggggcgtgcagtacgtggagacgtcagcgaagacccgggccaacgtggacaaggtgttctttgacctaatgagagaaatcagaacaaagaagatgtcagaaaacaaagacaagaatggcaagaaaagcagcaagaacaagaaaagttttaaagaaagatgttgcttactatgagtgtcaaggtgacggatgaagccagctgctcctaaggacacagggctgggttggtaaagagaaggctatggttgacttcttgcttgtgcttcccactctccccgacttcattcactcaaacttctttaaatggggaaaaatatttgtgactctgtggctggcagaagaaataagcccatgcaagtggaagggctgctttgtcaggaggttgtggaatttctttcttctccccttcttccctcccaaaagcttagctatgtataaagtgccacagataggaaacagctgttaattacaaagagaaagaattgtcatagcatcttattttgttcctagttttataacattaccatccttcgttttgaactacagatgttgtagtgggttttggaggagggagtggagtaagatgccctcccacttttatcagtttagtagtagtactgagaaaaatcccttcagctctaagaacactgaaaaatccaccgattttttgggtaagcttcttggcaataccctgtggatctgaaacagctaaaaaaatgaatttgaattgcgccagataggtcaataccaagcttctgattcctcctcacatatgaaaagtgaaagttgtgagttgttttcctcttatttaaacattggcctattataatctgtgttggttatttttctcctgtaagcatcctgatttttctgtaggaacttttctttggcagaccaagtgaagactcaggaatggtgtgcattataaatgacacacattgccacttgtgtagatatttttaagttctttggctaagtcctctcctaactgcctgtcctctggttaggcccctccctctccactagtggtgaatgcatgtgtctgtctgatcagcatcactgcacacggaggtctagtgagcctcttgctaagtgtcacacacactcttcccaaagacgtgatgagttaaagttgtattctgaaatcatgaagccagagcctgtgccagaccttctgctacctctcatagaattgctctgtaattctaaatttaaaattagaagtagagagagataagccatcgcccctttgcctctgagaattggctgctgtttctaatataattattttctaagatagccagatagttagaaaaagattttcattgatgacatatctttaaactttcttgcatcagtattctaaattgagcaaactgaaagattttcatcaggaaaggagcactgtgggaagagcccagtattcacattttttccccatttttcagaagcgacatttcatatataggtgccaaaagtgaatcggggtgcggagagtgggaaccttttgaatttatgattgtcacagagatggtagaaattatgatctgactggaaaacaatcctgtatcccctcccaaagaatcatgggctttttttttgaataaaaaagcagacaaatagaaaaaaaaaaaaaaa

SEQ ID NO: 625 - DNA, 434 bp, HOMO SAPIENS
acttccgctcgtccgcctaataccgcgcctgcgcaccgcgtctcttcctttctgggctcggacctaggtcgcggcgacatggccaaacgtaccaagaaagtcgggatcgtcggtaaatacgggacccgctatggggcctccctccggaaaatggtgaagaaaattgaaatcagccagcacgccaagtacacttgctctttctgtggcaaaaccaagatgaagagacgagctgtggggatctggcactgtggttcctgcatgaagacagtggctggcggtgcctggacgtacaataccacttccgctgtcacggtaaagtccgccatcagaagactgaaggagttgaaagaccagtagacgctcctctactctttgagacatcactggcctataataaatgggttaatttatgtaacaaaaaaaaaaaaaaaaaa

SEQ ID NO: 626 - DNA, 1834 bp, HOMO SAPIENS
cgggggcgggacttcagcggaggccggagcgaggcgtcgggatgcagcgccccgggcccttcagcaccctctacgggcgggtcttggccccgctgcccgggagggccgggggcgcggcctccggcggaggagggaacagctgggacctcccgggttcccacgtgcggctgccggggcgtgcacagtctgggacccgtggcggtgctggcaacacaagcaccagctgcggggactccaacagcatctgcccggccccctccacgatgtccaaggccgaggaggccaagaagctggcgggccgcgcggctgtggagaaccacgtgaggaataaccaagtgctgggaattggaagtggttctacaattgtccatgctgtgcagcgaatagctgaaagggtgaagcaagagaatctgaacctcgtctgtattcccacttccttccaggcccgccagctcatcctgcagtatggcttgaccctcagtgatctggatcgacacccagagatcgaccttgccatcgatggtgctgatgaagtagatgctgatctcaatctcatcaagggtggcggaggctgcctgacccaggagaagattgtggctggctatgctagtcgcttcatcgtgatcgctgatttcaggaaagattcgaagaatctcggggatcagtggcacaagggaatccccatcgaggtcatcccaatggcctatgtcccagtgagccgagctgtgagccagaagtttgggggcgtggttgaacttcgaatggctgtcaacaaggctggtcctgtggtgacagataatgggaattttatcttggactggaagtttgaccgggtacacaaatggagtgaagtgaatacagctatcaaaatgatcccaggtgtggtggacacaggcctattcatcaacatggctgagagagtctactttgggatgcaggatggctcagtgaacatgagggagaagcctttctgttgaccctgcaaggagcagagtgtgttcaccttgagtctccagcccacagccaaggtggacgtacctctccaggagcctttgccttaatgtatctctgcctggacaacttgtggtggggggtggggggaagagtgggagggggagttaaatccagtcttatgaagtattgttattaaatgtctttttaaaaagagaaatataaacatatatttttactattaaaatattcagttttttaaatgaagtagaacttgagttcatgttttatatgaaatatttaccaaaaaaaaaaaatgaggtaaactgtatttaaaacctttgacttgagtctgctggtaaagcttctgaatattgagtttgctgagaaataaaaatcaaaacttctttaagctggtaaagtgaggggcccaccagcagtgatctcctgatgccttactggaaactttgtttacttgtctgctaccctctgatttgtttttagttagtttttattgtgagcacacatagtacctagttacatcttaagatcaggtttataaaactgtggagtggagcggtatggtatggaatgacttggaatgtaagctgtcagggagaaaatgttgttacacttttgctaagatctgggggtttcttcatattcctgctgttggaagcagttgaccagaaatgcttgccagtactgccaaagcactgctgtgaaatgtgaagtactttgtttttttatttttaatgattttctttttgttattaatatttttctctgttcctttgttattacttgcatggtttggcgtcagaagtccttacctctttatattgtttgcaggtttaaataaaacagtgtggtgccattttga

SEQ ID NO: 627 - DNA, 25 bp, HOMO SAPIENS
ccctaacatttcaagaagaagcaga

SEQ ID NO: 628 - DNA, 1566 bp, HOMO SAPIENS
ggcccgttaagaagagcgtggccggccgcggccaccgctggccccagggaaagccgagcggccaccgagccggcagagacccaccgagcggcggcggagggagcagcgccggggcgcacgagggcaccatggcccagacgcccgccttcgacaagcccaaagtagaactgcatgtccacctagacggatccatcaagcctgaaaccatcttatactatggcaggaggagagggatcgccctcccagctaacacagcagaggggctgctgaacgtcattggcatggacaagccgctcacccttccagacttcctggccaagtttgactactacatgcctgctatcgcgggctgccgggaggctatcaaaaggatcgcctatgagtttgtagagatgaaggccaaagagggcgtggtgtatgtggaggtgcggtacagtccgcacctgctggccaactccaaagtggagccaatcccctggaaccaggctgaaggggacctcaccccagacgaggtggtggccctagtgggccagggcctgcaggagggggagcgagacttcggggtcaaggcccggtccatcctgtgctgcatgcgccaccagcccaactggtcccccaaggtggtggagctgtgtaagaagtaccagcagcagaccgtggtagccattgacctggctggagatgagaccatcccaggaagcagcctcttgcctggacatgtccaggcctaccaggaggctgtgaagagcggcattcaccgtactgtccacgccggggaggtgggctcggccgaagtagtaaaagaggctgtggacatactcaagacagagcggctgggacacggctaccacaccctggaagaccaggccctttataacaggctgcggcaggaaaacatgcacttcgagatctgcccctggtccagctacctcactggtgcctggaagccggacacggagcatgcagtcattcggctcaaaaatgaccaggctaactactcgctcaacacagatgacccgctcatcttcaagtccaccctggacactgattaccagatgaccaaacgggacatgggctttactgaagaggagtttaaaaggctgaacatcaatgcggccaaatctagtttcctcccagaagatgaaaagagggagcttctcgacctgctctataaagcctatgggatgccaccttcagcctctgcagggcagaacctctgaagacgccactcctccaagccttcaccctgtggagtcaccccaactctgtggggctgagcaacatttttacatttattccttccaagaagaccatgatctcaatagtcagttactgatgctcctgaaccctatgtgtccatttctgcacacacgtatacctcggcatggccgcgtcacttctctgattatgtgccctggccagggaccagcgcccttgcacatgggcatggttgaatctgaaaccctccttctgtggcaacttgtactgaaaatctggtgctcaataaagaagcccatggctggtggcatgcaaaaaaaaaaaaaaaaaaaaaaaaaaaaaaaaaaa

SEQ ID NO: 629 - DNA, 2900 bp, HOMO SAPIENS
ccgggagtcggtgaggcggctgcaggtccctccctgcggagccgctggtccggctggcggagatgtgaccgcgggcccggccggcctgcctcaggcgtcgcgtcagctcccgtgtccgtgcccttaacccacaccgatggcgggatccggctgcgcctggggcgcggagccgccgcgttttctggaggccttcgggcggctgtggcaggtacagagccgtctgggtagcggctcctccgcctcggtgtatcgggttcgctgctgcggcaaccctggctcgccccccggcgccctcaagcagttcttgccgccaggaaccaccggggctgcggcctctgccgccgagtatggtttccgcaaagagagggcggcgctggaacagttgcagggtcacagaaacatcgtgactttgtatggagtgtttacaatccacttttctccaaatgtgccatcacgctgtctgttgcttgaactcctggatgtcagtgtttcggaattgctcttatattccagtcaccagggttgttccatgtggatgatacagcattgtgcccgagatgttttggaggcccttgcttttcttcatcatgagggctatgtccatgcggacctcaaaccacgtaacatattgtggagtgcagagaatgaatgttttaaactcattgactttggacttagcttcaaagaaggcaatcaggatgtaaagtatattcagacagacgggtatcgggctccagaagcagaattgcaaaattgcttggcccaggctggcctgcagagtgatacagaatgtacctcagctgttgatctgtggagcctaggaatcattttactggaaatgttctcaggaatgaaactgaaacatacagtcagatctcaggaatggaaggcaaacagttctgctattattgatcacatatttgccagtaaagcagtggtgaatgccgcaattccagcctatcacctaagagaccttatcaaaagcatgcttcatgatgatccaagcagaagaattcctgctgaaatggcattgtgcagcccattctttagcattccttttgcccctcatattgaagatctggtcatgcttcccactccagtgctaagactgctgaatgtgctggatgatgattatcttgagaatgaagaggaatatgaagatgttgtagaagatgtaaaagaggagtgtcaaaaatatggaccagtggtatctctacttgttccaaaggaaaatcctggcagaggacaagtctttgttgagtatgcaaatgctggtgattccaaagctgcgcagaaattactgactggaaggatgtttgatgggaagtttgttgtggctacattctacccgctgagtgcctacaagaggggatatctgtatcaaaccttgctttaatcagtaacctaaggactgtttcctttttctcctcttccatttcttgggttattccacatatgaatgcaggactacccccttaccattttaagaaggtactttatacatttatttaatcctactaatgtgcagccattgcccaagcagtgactgcgttgcatacatttggcactgagtaggacaagacctctcagctatacattgaggggttttagagcatccatgtgggcaacccttttttgtgcgggagagcaggtgttgctcttcagtatgtagcctaaaaaaatcttaattatttcatggatcatgaagcaaggatgaataatatcatgtcttggtaaatactaacaaatttgttaggtttggtgacatcatttacagattatttctttatgttgtccagtggttcttccttattgttgatatccataagctggcactggatgctctcagtaatgttaagtaattgtcaagcagcagttacctactgtgttcttaacactgagttgtgaattttttcttaaagcagtactgtagtactgaatattcctttaaaggaactgcagtgagcctatctaagtttttttaaattaaggcttttaaaatagaaagctgatgcttgatcttgcacaatttttatgtctagtatgtatgcttgagtgaatgtgtgagtatgaatgattagagaaaatttgagtcagtgtactttatagtgtgaatcctgtgagctaatacagtctatacttatttcttccctacctgtttcacatccgtaagatttaggatatacattttttgagaggtagtctgtctgatacaatgtaaatgacaaaacataattcctgagaggcccagaacaaactggagtctagcctggagttaaattgagacttctaaaatgattggaacaaagactaagttgtgccagatgtaaatcaacccctcttttagtttactttagactttgtattagctcatcttttttgtagtaaatctatagttttaaggtttctcaagatgtggctctacctactatgatgaaaattgaagtgggtcaaaagaattagatgtacagtgaagggaaaagaaaaaaaatgggcgaagagagggtggaaaataaaaggattcttttttcttcctttctgtttctcgtatccctgctccctttttcctccccttccctcattctttgcctctatccttagctgaagacaaactagaggagcagcatcccaggtagtttggcttttgactgcaaggtagttaagaaaggtgtagatataatgaggtagaagtagaaaggaagaaaaactcaaagaattctgaaaaggattcatagcaacataatgtgtccctgagtagaggatgctgctatgcgtgagttcatggacacaagttgattacatggtttttagaattataattatggattcttcttatttcatggtaggttgtctttaaagatataaaaattaggatgcctttatgaagcactgattatacc

SEQ ID NO: 630 - DNA, 6426 bp, HOMO SAPIENS
gattgctgtggcgtcctgcccgtccccgcccgcgtgtgtgcgagggagggcgagtgcgccgggtcggcctgatgggggtaatcgagggtttcggggacgccgagcggcactttcctcttcccagcgagtgaaggagggcagtcggcggctctcgcgccccggccactttccctgcgcgattcccggagctccctgcaggaggtgagagtccccagcgggtccggatggcgtagttttgccgcggcgcagcagctgccggagctcgccgccgccgagcgctgggcggggaaacttgccgccgctttcctccaacttgctgcgggtggatctccgctggacacaccgcctccgaggcagtttgaaaattgcaaggagggactttaagactacttctgatttgcaaagattgtctgtgctctgagcaggctgaagtgactggacgagacgcactgttggagaaataaaaatgacttcccattatgtgattgccatctttgccctgatgagctcctgtttagccactgcaggtccagagcctggtgcactgtgtgaactgtcacctgtcagtgcctcccatcctgtccaggccttgatggagagcttcactgttttgtcaggctgtgccagcagaggcacaactgggctgccacaggaggtgcatgtcctgaatctccgcactgcaggccaggggcctggccagctacagagagaggtcacacttcacctgaatcccatctcctcagtccacatccaccacaagtctgttgtgttcctgctcaactccccacaccccctggtgtggcatctgaagacagagagacttgccactggggtctccagactgtttttggtgtctgagggttctgtggtccagttttcatcagcaaacttctccttgacagcagaaacagaagaaaggaacttcccccatggaaatgaacatctgttaaattgggcccgaaaagagtatggagcagttacttcattcaccgaactcaagatagcaagaaacatttatattaaagtgggggaagatcaagtgttccctccaaagtgcaacatagggaagaattttctctcactcaattaccttgctgagtaccttcaacccaaagcagcagaagggtgtgtgatgtccagccagccccagaatgaggaagtacacatcatcgagctaatcacccccaactctaacccctacagtgctttccaggtggatataacaattgatataagaccttctcaagaggatcttgaagtggtcaaaaatctcatcctgatcttgaagtgcaaaaagtctgtcaactgggtgatcaaatcttttgatgttaagggaagcctgaaaattattgctcctaacagtattggctttggaaaagagagtgaaagatctatgacaatgaccaaatcaataagagatgacattccttcaacccaagggaatctggtgaagtgggctttggacaatggctatagtccaataacttcatacacaatggctcctgtggctaatagatttcatcttcggcttgaaaataatgcagaggagatgggagatgaggaagtccacactattcctcctgagctacggatcctgctggaccctggtgccctgcctgccctgcagaacccgcccatccggggaggggaaggccaaaatggaggccttccgtttcctttcccagatatttccaggagagtctggaatgaagagggagaagatgggctccctcggccaaaggaccctgtcattcccagcatacaactgtttcctggtctcagagagccagaagaggtgcaagggagcgtggatattgccctgtctgtcaaatgtgacaatgagaagatgatcgtggctgtagaaaaagattcttttcaggccagtggctactcggggatggacgtcaccctgttggatcctacctgcaaggccaagatgaatggcacacactttgttttggagtctcctctgaatggctgcggtactcggccccggtggtcagcccttgatggtgtggtctactataactccattgtgatacaggttccagcccttggggacagtagtggttggccagatggttatgaagatctggagtcaggtgataatggatttccgggagatatggatgaaggagatgcttccctgttcacccgacctgaaatcgtggtgtttaattgcagccttcagcaggtgaggaaccccagcagcttccaggaacagccccacggaaacatcaccttcaacatggagctatacaacactgacctctttttggtgccctcccagggcgtcttctctgtgccagagaatggacacgtttatgttgaggtatctgttactaaggctgaacaagaactgggatttgccatccaaacgtgctttatctctccatattcgaaccctgataggatgtctcattacaccattattgagaatatttgtcctaaagatgaatctgtgaaattctacagtcccaagagagtgcactttcctatcccgcaagctgacatggataagaagcgattcagctttgtcttcaagcctgtcttcaacacctcactgctctttctacagtgtgagctgacgctgtgtacgaagatggagaagcacccccagaagttgcctaagtgtgtgcctcctgacgaagcctgcacctcgctggacgcctcgataatctgggccatgatgcagaataagaagacgttcactaagccccttgctgtgatccaccatgaagcagaatctaaagaaaaaggtccaagcatgaaggaaccaaatccaatttctccaccaattttccatggtctggacaccctaaccgtgatgggcattgcgtttgcagcctttgtgatcggagcactcctgacgggggccttgtggtacatctattctcacacaggggagacagcaggaaggcagcaagtccccacctccccgccagcctcggaaaacagcagtgctgcccacagcatcggcagcacgcagagcacgccttgctccagcagcagcacggcctagcccaacccagcccaacccggcccaacccagcccagcccagctcagctcagctactgccaagggcaggaccaatggctgagcctcgtgtccagactcagagggctggattttggttcccttgtaaagacagagtgaatttcagtataaagatcacccgttgtattcaccccacacccagggctagtataaacatgaccctgggcttctgtaccacactagaattcatgtgagaaagctaaaatggtggtcttctccaccagcccctcacaggcttgggggttttcaatgtgaaacacatgccagtttttaaaatgctgctttgtccaggtgagaacatccataatttggggccctgagttttacccagactcaaggagttggtaaagggttaatagccagatagtagaaccagtgaggagatgcggccaaagattctttatatctgaaccaagatgtaaaacaagaaatgctttgaggctttctaagcgatcctcctgtctaatttgcacctttgtctggatgcacacttctgaccttgctgccacaacctgtggggtctgatgtgtcccttgatgggtgctgccctcagggactgcaccctgacaagtgttaaggcaacattcctttcttgtgccctgggccaaaaccaatgctgatgaccttatcagcttcctgtttcttcccatacttgcatacaccactgcaaaatgtcttaatgcaaattttgtatttcttacaggcctacagaaattgaaaatgaccaaaatcaggaaccacagatttgtgcccattcctaatattttgttctgcaaattaatgtataatttgaggtgaaattcagttataaagtcaaggacgaatttgcacagtgatatatttctatgtgtatgcaagtacaagtatataatatgtcacctggcacattcattttctcagttgaagaagagaaaatttgaaaatgtccttatgcttttagagttgcaacttaagtatatttggtagggtgagtgtttccactcaaaatatgtcaacttaaaaaaaaataggccctttcataaaaaccaaactgtagcaagatgcaaatgcatggcaaatcctgtcggtctccagttggttatctgaatagtgtcaccaattccaccaagacagtgctgagattggaaaagggcactcatttggattgccttacttctcttgccttaaatatatcccatatatttaatatgtcaaaaagggcttgaggtgaatttcattaaatggaataatatgatgccactttgcagctaaaataagctcagtgatacctccttgttaaaaaaaaaaaaaaaaaaaaagaatgccaggggggaattatcatgctaaattattttactgctgaagatagcttcattgcaaattattctttttccagaatttcccccaaacaacttagaattccataagtagaacaagatagattctacccccaaaatattcataagcaaatcccactgcccttaaaataaggaagttatgcctggttgtctgtgaatggaacctcagtaggtaatcctgatgaagcttaaaaccttagggcagtgtctacatgggaaacaagtatgtggaaattgacaatcatttttaccaaatcgttgagtaataatatgacttacctgatagatatacacattcaataaggaacatttttttttttcaataaggaacattttaactaaaacattactttagggctgagatttccaggctatctacattgatctactgaaaaatttctagatttccatatacaaacgaagaagacatgagtttagagaatttttttcctttaatttttttttaacagaagggtatcagagtggaggacctagattacgctacctgtgtttgaaaatattgcgctttgcctaaccttcggtggaatgtattgtttcagcatattctatgtataaaaaagtttaaagatgtcttcaaagaagactagagtctttaagtcacttatagctatattttactacaaaatttgtgtataaagatatatttaagtgttttagataaatttaagttactccatatgaaatgtttaatttcagctactgtgaattctttcgatcagtcctttgcttttttaaaaaatcttttccatcgtgttaaaaagaaaattagctattaggagatattaaaagattgatgtcttagaaggacagggttaaaaccttctgtaatatatttaaatatatatttttaagagagatgctacattgccaatgattttataaataatttaaaattaatttacaaatttatagatgcaaaccaaaagatctttttaaaagagagagagaggaaaaaaatcaccttttatttgtttgggtctcattgtcagaattattattcagatcaagaaatctgtgtcgataaaacctaatctcatattggagagtgaatgtcgttaagtatttctgaaatgtttctaaaaaatgaacatgaaaaaaataaggtattttctccctagcttctcattacagtatttctaattgcttcacactttacagttttaatacaaagtacaagctctacttttataacgtgtactacaagtttctttaaaagtattgttgtatttcagctgaactcttgtatctgcagtcttttgttatttctgcaggctacacccttaatttgcagaggccattttgttgtttgtttgatgctgaagctgttgttaaaatgccccaaactccaaggcagattgtctgtataatacgctatagcttttcaccatgtggtgtttaccagctgttactctgtattttaaaaagccagagatttcttctgtctaaactgtttctatagcattttctaaacaaaaaaaatggtttttttctttgccttgtaataagattgtaaatccatttcctgcttgtgttcttagtgggcatgattgtgagtgtgtgtggggtgctcacacgcgtgccagtctttttgtactgtaactacctcatggtttgaatgatgattgtactgctggttgtgttaacagagcacattttgttgggtgagtcctatgtgatttttttcatgtttgttttatctgggggttgttcatgaaactgacagatgtttttctaaaaaggactattatcagtttccaaatacaatacttctctcttctggtttttcctgaatgagcctgattttgttgctggttttcatcatctatgagggtaaaacgagtacccttaaaatccctgtggccagtttgaacacccctgttgtattcttttctctgttcagtgtgtcagctattttgtgaagatgcttagatgtatagttttgataaccacagttttaaatcttttatctgtgcataataaaaagatatatatcagttattaaaaaaaaaa

SEQ ID NO: 631 - DNA, 5850 bp, HOMO SAPIENS
acaagtctttccgcctccccagcccgcccgggagctgcgagccgcgagctggattatggtggcctgagcagccaacgcagccgcaggagcccggagcccttgcccctgcccgcgccgccgcccgccggggggaccagggaagccgccaccggcccgccatgcccgcccctcccagccccgccgggagcccgcgcccgctgcccaggctggccgccgccgtgccgatgtagcgggctccggatcccagcctctcccctgctcccgtgctctgcggatctcccctgaccgctctccacagcccggacccgggggctggcccagggccctgcaggccctggcgtcctgatgcccccaagctccctctcctgagaagccaccagcaccacccagacttgggggcaggcgccagggacggacgtgggccagtgcgagcccagagggcccgaaggccggggcccaccatggcccaagccctgccctggctcctgctgtggatgggcgcgggagtgctgcctgcccacggcacccagcacggcatccggctgcccctgcgcagcggcctggggggcgcccccctggggctgcggctgccccgggagaccgacgaagagcccgaggagcccggccggaggggcagctttgtggagatggtggacaacctgaggggcaagtcggggcagggctactacgtggagatgaccgtgggcagccccccgcagacgctcaacatcctggtggatacaggcagcagtaactttgcagtgggtgctgccccccaccccttcctgcatcgctactaccagaggcagctgtccagcacataccgggacctccggaagggtgtgtatgtgccctacacccagggcaagtgggaaggggagctgggcaccgacctggtaagcatcccccatggccccaacgtcactgtgcgtgccaacattgctgccatcactgaatcagacaagttcttcatcaacggctccaactgggaaggcatcctggggctggcctatgctgagattgccaggcctgacgactccctggagcctttctttgactctctggtaaagcagacccacgttcccaacctcttctccctgcagctttgtggtgctggcttccccctcaaccagtctgaagtgctggcctctgtcggagggagcatgatcattggaggtatcgaccactcgctgtacacaggcagtctctggtatacacccatccggcgggagtggtattatgaggtgatcattgtgcgggtggagatcaatggacaggatctgaaaatggactgcaaggagtacaactatgacaagagcattgtggacagtggcaccaccaaccttcgtttgcccaagaaagtgtttgaagctgcagtcaaatccatcaaggcagcctcctccacggagaagttccctgatggtttctggctaggagagcagctggtgtgctggcaagcaggcaccaccccttggaacattttcccagtcatctcactctacctaatgggtgaggttaccaaccagtccttccgcatcaccatccttccgcagcaatacctgcggccagtggaagatgtggccacgtcccaagacgactgttacaagtttgccatctcacagtcatccacgggcactgttatgggagctgttatcatggagggcttctacgttgtctttgatcgggcccgaaaacgaattggctttgctgtcagcgcttgccatgtgcacgatgagttcaggacggcagcggtggaaggcccttttgtcaccttggacatggaagactgtggctacaacattccacagacagatgagtcaaccctcatgaccatagcctatgtcatggctgccatctgcgccctcttcatgctgccactctgcctcatggtgtgtcagtggcgctgcctccgctgcctgcgccagcagcatgatgactttgctgatgacatctccctgctgaagtgaggaggcccatgggcagaagatagagattcccctggaccacacctccgtggttcactttggtcacaagtaggagacacagatggcacctgtggccagagcacctcaggaccctccccacccaccaaatgcctctgccttgatggagaaggaaaaggctggcaaggtgggttccagggactgtacctgtaggaaacagaaaagagaagaaagaagcactctgctggcgggaatactcttggtcacctcaaatttaagtcgggaaattctgctgcttgaaacttcagccctgaacctttgtccaccattcctttaaattctccaacccaaagtattcttcttttcttagtttcagaagtactggcatcacacgcaggttaccttggcgtgtgtccctgtggtaccctggcagagaagagaccaagcttgtttccctgctggccaaagtcagtaggagaggatgcacagtttgctatttgctttagagacagggactgtataaacaagcctaacattggtgcaaagattgcctcttgaattaaaaaaaaaaactagattgactatttatacaaatgggggcggctggaaagaggagaaggagagggagtacaaagacagggaatagtgggatcaaagctaggaaaggcagaaacacaaccactcaccagtcctagttttagacctcatctccaagatagcatcccatctcagaagatgggtgttgttttcaatgttttcttttctgtggttgcagcctgaccaaaagtgagatgggaagggcttatctagccaaagagctcttttttagctctcttaaatgaagtgcccactaagaagttccacttaacacatgaatttctgccatattaatttcattgtctctatctgaaccaccctttattctacatatgataggcagcactgaaatatcctaaccccctaagctccaggtgccctgtgggagagcaactggactatagcagggctgggctctgtcttcctggtcataggctcactctttcccccaaatcttcctctggagctttgcagccaaggtgctaaaaggaataggtaggagacctcttctatctaatccttaaaagcataatgttgaacattcattcaacagctgatgccctataacccctgcctggatttcttcctattaggctataagaagtagcaagatctttacataattcagagtggtttcattgccttcctaccctctctaatggcccctccatttatttgactaaagcatcacacagtggcactagcattataccaagagtatgagaaatacagtgctttatggctctaacattactgccttcagtatcaaggctgcctggagaaaggatggcagcctcagggcttccttatgtcctccaccacaagagctccttgatgaaggtcatctttttcccctatcctgttcttcccctccccgctcctaatggtacgtgggtacccaggctggttcttgggctaggtagtggggaccaagttcattacctccctatcagttctagcatagtaaactacggtaccagtgttagtgggaagagctgggttttcctagtatacccactgcatcctactcctacctggtcaacccgctgcttccaggtatgggacctgctaagtgtggaattacctgataagggagagggaaatacaaggagggcctctggtgttcctggcctcagccagctgcccacaagccataaaccaataaaacaagaatactgagtcagttttttatctgggttctcttcattcccactgcacttggtgctgctttggctgactgggaacaccccataactacagagtctgacaggaagactggagactgtccacttctagctcggaacttactgtgtaaataaactttcagaactgctaccatgaagtgaaaatgccacattttgctttataatttctacccatgttgggaaaaactggctttttcccagccctttccagggcataaaactcaaccccttcgatagcaagtcccatcagcctattatttttttaaagaaaacttgcacttgtttttctttttacagttacttccttcctgccccaaaattataaactctaagtgtaaaaaaaagtcttaacaacagcttcttgcttgtaaaaatatgtattatacatctgtatttttaaattctgctcctgaaaaatgactgtcccattctccactcactgcatttggggcctttcccattggtctgcatgtcttttatcattgcaggccagtggacagagggagaagggagaacaggggtcgccaacacttgtgttgctttctgactgatcctgaacaagaaagagtaacactgaggcgctcgctcccatgcacaactctccaaaacacttatcctcctgcaagagtgggctttccagggtctttactgggaagcagttaagccccctcctcaccccttccttttttctttctttactcctttggcttcaaaggattttggaaaagaaacaatatgctttacactcattttcaatttctaaatttgcaggggatactgaaaaatacggcaggtggcctaaggctgctgtaaagttgaggggagaggaaatcttaagattacaagataaaaaacgaatcccctaaacaaaaagaacaatagaactggtcttccattttgccacctttcctgttcatgacagctactaacctggagacagtaacatttcattaaccaaagaaagtgggtcacctgacctctgaagagctgagtactcaggccactccaatcaccctacaagatgccaaggaggtcccaggaagtccagctccttaaactgacgctagtcaataaacctgggcaagtgaggcaagagaaatgaggaagaatccatctgtgaggtgacaggcaaggatgaaagacaaagaaggaaaagagtatcaaaggcagaaaggagatcatttagttgggtctgaaaggaaaagtctttgctatccgacatgtactgctagtacctgtaagcattttaggtcccagaatggaaaaaaaaatcagctattggtaatataataatgtcctttccctggagtcagtttttttaaaaagttaactcttagtttttacttgtttaattctaaaagagaagggagctgaggccattccctgtaggagtaaagataaaaggataggaaaagattcaaagctctaatagagtcacagctttcccaggtataaaacctaaaattaagaagtacaataagcagaggtggaaaatgatctagttcctgatagctacccacagagcaagtgatttataaatttgaaatccaaactactttcttaatatcactttggtctccatttttcccaggacaggaaatatgtccccccctaactttcttgcttcaaaaattaaaatccagcatcccaagatcattctacaagtaattttgcacagacatctcctcaccccagtgcctgtctggagctcacccaaggtcaccaaacaacttggttgtgaaccaactgccttaaccttctgggggagggggattagctagactaggagaccagaagtgaatgggaaagggtgaggacttcacaatgttggcctgtcagagcttgattagaagccaagacagtggcagcaaaggaagacttggcccaggaaaaacctgtgggttgtgctaatttctgtccagaaaatagggtggacagaagcttgtggggtacatggaggaattgggacctggttatgttgttattctcggactgtgaattttggtgatgtaaaacagaatattctgtaaacctaatgtctgtataaataatgagcgttaacacagtaaaatattcaataagaagtcaaaaaaaaaaaaaaaaaa

SEQ ID NO: 632 - DNA, 3163 bp, HOMO SAPIENS
gcgcgcgccgccgctgccacctccgctgctcggcccggtcccggagtggcccggccggcccgcggggcgcggagccgaggcccgcggctggctgcatgaaggactgcgagtaccagcagatcagccccggggccgccccgctgcccgcctccccgggggcgcgccgtcccggccccgccgcgtccccgactccgggccccgggcccgcgccgcccgccgcccccgccccgccgcgctggagcagcagcggcagcggcagcggcagcgggagcgggagcctcggccgccgcccacggcgcaagtgggaggtgttcccgggtcgcaatcgcttctactgcggcggccgcctcatgctggccggccacggcggcgtcttcgcgctcacgctgctgctcatcctcaccaccaccggcctcttcttcgtctttgactgtccctacctggctcgcaagctgacccttgccatccccatcatcgctgccatcctcttcttcttcgtcatgagctgcctgctgcagacaagcttcaccgaccctgggatcctgccccgggccactgtctgtgaagcagccgccctggagaaacagatcgacaacacaggcagttctacataccggccaccccctcggacccgggaggtgctgatcaacgggcagatggtgaagctgaagtactgcttcacctgcaagatgttccggccaccccgaacctcacactgcagtgtctgcgacaactgtgtggaacgatttgaccatcactgcccctgggtgggcaactgtgtggggagacggaactatcgcttcttctacgcgtttattctctccctctcattcctgacggccttcatcttcgcctgtgtggtcacccacctgacgttgcgcgctcagggaagcaacttcctctccactctgaaggagacaccagcaagcgtgctggagttggtgatctgcttcttctccatctggtccattctgggcctctcagggtttcacacgtacctcgtcgcctccaacctgactactaatgaagacatcaaaggctcgtggtccagcaagaggggcggtgaggcctctgtcaacccctacagccataaaagtattatcaccaactgctgtgctgtgctctgtggccccctacctcccagcctaattgaccggaggggatttgtgcagtccgacaccgtgttgccctcacccatcagaagcgatgagccagcctgcagagccaagcctgatgccagcatggtaggaggccacccctgaccacggctcagtacttgccacctgctggcctgtctgaccctccgcactcacctgccgggaccctccctattccatccaagggaagcagaactgccaaagactcaagtcttttcatatttatttcccatcctgcgtggctttccctgaactgttccgtggctgtgccctctgctccccaaacccaggttcccacagccttgggccctaggtaccccagctgatcagtgccaggagagaccagagcctctggaggctacccaggggaccacaccaagtccttgcctgtgccgggcgagccctgtgtgagtgaggctgtgaactgagcgtgaggcctcccaggtgggggaactgcttgggccttgctgagccagggtcctcagggtgaagcaggactgaggagtggccagctctggatagctggctgtggagaggaagcctccatgggctgctttggtctgtgggctccttcattcccttggtgataatttccctttcttctgtgggatttttggtggggttttccccccttttttatggagttggccaataggattgagttggggctccagtagagaaggcagggttggtggtgggtgggggcagcctgtatcagacaaaggtaaatcagccagccaggcacccacagcctcagctcctgtgcagttcctgggcagcacagtggaagtgggagcctggtccttcccctgcccatggagagctctttaagggatcccagcctgcccctccacttctctcccaagccaggtcccggcatgggtgggttatgctcatgctggcaatacttgaaacgggtttattaatgctgggtattttgcacaattttatagacctcttttctacatagtcttttttaaatggaaggagaaaatgtcagccacattactgtctgtgtagtgccaggtgaagggttatcagaaggctggttggttttaataagtttattccaagagaccttctggctggaatgagtgagagtgtgtgtgcatgtgtgtgtgtgttcatgtgtgccctgtatgaatgtggctggctcccatatcccctgggctgccccctgccccatcccctttgagtatcagaagcactctgagccaaggggacagggggcacgtgcactggtcacgagaaaaccctgggctcccactggggctcagcccagcctcctatctttccttcttctatggacttcagacagccagtgtctggggactctgccactctacccccagccctacccaccagcccccaggtgaggcttccagctgggacctgcccagacaggctgagcctgggcgtggtgggtggggtgatggctctggggagcggctgccatcctacaagccacaccccctcctctgagctctgaatatgggacccagtgccaggagctggaagacaaggtgtttctgccaaacggggacctccatccagagaaaaggaagaaggtgcagggtgggccaagaggcaagtgaaggttggcctgagtctgggccggaaactcagaggatgtttctcctctgctgggagctgtagtttcttatcaaaatagatattgttccaccatccccctccttggcccttcaagtgggctgaagcccttggaaagtgacataggaagtccccagatcttgcccttctcactccagaggctagtggtcacagacagctgggaatggcagccacagagggtcccctctgggagaaacagcttcaccccagcctcagggccctgggccatcactgcagtggccctgggaggtgaggaagaagctggctagaggagggggctcccacctaccttttatttaagccagtattctttgttcctgcttgtaataaaacttcagtttataagaaaaaaaaaaagaaaaaaaaaaaaaaaa

SEQ ID NO: 633 - DNA, 1411 bp, HOMO SAPIENS
aatcagagctggttccgcgccgcggccgccgcgacaggtgcagcagagccgagccggccgcgctccgaacggcgcctcccgccccaccatgggcaacagcgcgagccgcagcgacttcgagtgggtctacaccgaccagccgcacacgcagcggcgcaaggagatactggccaagtacccggccatcaaggccctgatgcggccagacccgcgcctcaagtgggcggtgctggtgctggtgctggtgcagatgctggcctgctggctggtgcgcgggctggcctggcgctggctgctgttctgggcctacgcctttggtggctgcgtgaaccactcgctgacgctggccatccacgacatctcgcacaacgcggccttcggcacgggccgtgcggcacgcaaccgctggctggccgtgttcgccaacctgcccgtgggtgtgccctacgccgcctccttcaagaagtaccacgtggaccaccaccgctacctgggcggcgacgggctggacgtggacgtgcccacgcgtctggagggctggttcttctgcacacccgcccgcaagctgctctggctggtgctgcagcccttcttctactcactacggccgctctgcgtccaccccaaggccgtgacccgcatggaggtgctcaacacgctggtgcagctggcggccgacctggccatctttgccctttgggggctcaagcccgtggtctacctgctggccagctccttcctgggcctgggcctgcaccccatctcgggccacttcgtggccgagcactacatgttcctcaagggccacgagacctactcctactatgggcctctcaactggatcaccttcaatgtgggctaccacgtggagcaccacgacttccccagcatcccgggctacaacctgccgctggtgcggaagatcgcgcccgagtactacgaccacctgccgcagcaccactcctgggtgaaggtgctctgggattttgtgtttgaggactccctggggccctatgccagggtgaagcgggtgtacaggctggcaaaagatggtctgtgagcccgggctgcctcctggtggtggccattgtcccccatcggcccctcagccttgcaccccagcactgagaagctacatttccttcctgtgctctggactgctgcccttgtccccgaggagtgtcccgcgcagccacacctggcaacagcagtgtgggctgcagggctccgtctgcacgtggacttgccctggaccttgagtgtggccctccctttctgggcctccccaggtgaggcctggccctgccccaccatgacctgggtgctctgagcccacggttcccacggagctgacttctccggggtgcctgtgccctacattaaacccggcgtttgtttcacagccaaaaaa

SEQ ID NO: 634 - DNA, 3000 bp, HOMO SAPIENS
ccgcccgttcgcgctgccagcagcttccgcctgctacggtcctggcaagcacctcgggatcccattccttcacagggaccctagccagttaaagctgatacattcctgtgggtcaactatgcaactaactcagattttgagcaaacaaagctctcaagttggtgatcctcaggagtctctgcattagttggacagctcttctggaattatcttctaagtcaactgtgggttgggtaggtggctctgctgatttttcgctggacttccacatttgggaccagttggctgtcatcagctctagaaagggtgtggctgttttacattggctgttttcctcacattcctcaagcaggtactgtaataaagaactggagaaatacagtcagatgggaagtagcccctgctgtcaaggagcttgccatctaatgggggagacaggcaagtaaaccaaagactacacagtgcagtatggtaagtgccatgattttgatgtgacagggcacagtggacgaccttccaaatcaaagcaagtaactaggggttgacaatggtaagtatcatagttgaagtatccttgaacaaggtttcaggaagaagaagaagggaatttcatgcagggaaacagccaaagctcagtgagtcaaaatatcacagcattcttggtaagcccaattgttttttctgttttgctattttggtggagagaaaggaacacataaaggaataacatgagagaaggctatttggggaagtgtagtagttaaggttctggctcaaacaacaactgcagctcataaagttgactttagtggaaggatactggggtatctcatggaatcttgggaactgttgaataaccagggaaactctgggaaactcactggtaggaatccataaactgtcctcctggtgggctgtaaacaactcaccctctatgcatctcacatcaaaattccagtttcttgggaaaacaagtctgtttgcccaatttgggtcatatttccacctccatgttactcaggcatgattcatctgcaagttatgtgtatagatattttgctactgttccacccttacgctgtgctggggagggaggtgtcactgtgagctgtgtcggtgccttaagagatatctgttgtgtcttattacttggttgcttttccccacatgtacaatgacaaaaatgccttcaacctatttgatccagccgttccagtacaactcctatacttgccatctttccaagcccaaaggtacatccagctgatggaaggagcatcttggtgttaatattcttttagtcatggtctctgaaagtaaaatgtctattcttctaattctggcacaatcttatctagctatagttcctcatggtcctgcactccatggactaaattgtaagtataattactaccaatgtactctataaataacttttggggccagggtggcaatagttgctagaaaaaaaaaaaaaaaaaaaggaaggagaagaaaacagtgatagttcttattttaaaaggaaaaaaagaggcaggaggctctcttgaggccaggagtttaagaccagcctaggcagcatttcaagaccctgtctctactaaaaagtaaaaaaaaaatttagtcaggcatggtggcatgcacctgtagtcgtagctactcaggagactgaggtgggaggattgattgagctcaggagtttgaggctgcagtgagcaatcatcatgccattgcactccagcctgggcatcagagcaagaccttgtcttttaggaaaaaaaggcagggaagaggaataggtaatttttcagtgttcagacattccagcaatatgtgtggagtactcattctcactacagtttatgaggccatagctagtatgtatgactacccatccaagtttccctgcttacagttactattccaactgattggggggcttttcctaatagagtgatttaagccttcatttttagacatctaagcccttggtgatcatcagcataaaatgtgacaaattaaacaaaagcaagacagcacatcagagaacaactctgaggtggaatgattgggaaccaatgaatagttgttcagtaaatggtttatattttacagatgatgaaactgaaacacaaaaaatttagattaactcttaggtgacaaagccaggattgaagctcatgcggtctggctccagaacaactcttcttcatagttacgttatactgcccctgcattgttggtattgaaaaatttcctttcatctctggtaaaagtcagctctctaactactgcatctcacagctgaacagataactgataccgtggttccagaagatttttctaacagtgtttgcaagctataaaatagtgctttcacttagaaaaggctggacgtggtggttcatgcctgtaatcccagcactttgagaggccgaggcaccatgctgggagataaggatccaacataagacaaacagtgctgatgcttttggaaagctcatattcaagctggggagacaaacaacatacaagtggctgtagctaccttctgcatatggatatccagttttcccagcaccacttattaaagagactgtcttttctgcagtgtatattcttggcaccattgttgaaaatgaattcattgtaggtgtgtgggtttgtttctgggttctctattctgttcaacttgtctatgtgtctgtttttatgccagtaccgtgtcattttagttaccagagctctgcagtataatttgaaaccaggtcatgtgattcctccagttttgtggtattaggataggtttggctattctgagtcttttgtggttccatataaattttagaattttttttttctatttctgtgaagaatgtcattggtattttgatagggattgcgttgaatctgtagattgctttgggtagtatggacattttaacaatattcattcttctaatccatggaacatgggaatacctttccattaaaaaaaaa

SEQ ID NO: 635 - DNA, 2961 bp, HOMO SAPIENS
aagagatgatttctccatcctgaacgtgcagcgagcttgtcaggaagatcggaggtgccaagtagcagagaaagcatcccccagctctgacagggagacagcacatgtctaaggcccacaagccttggccctaccggaggagaagtcaattttcttctcgaaaatacctgaaaaaagaaatgaattccttccagcaacagccaccgccattcggcacagtgccaccacaaatgatgtttcctccaaactggcagggggcagagaaggacgctgctttcctcgccaaggacttcaactttctcactttgaacaatcagccaccaccaggaaacaggagccaaccaagggcaatggggcccgagaacaacctgtacagccagtacgagcagaaggtgcgcccctgcattgacctcatcgactccctgcgggctctgggtgtggagcaggacctggccctgccagccatcgccgtcatcggggaccagagctcgggcaagagctctgtgctggaggcactgtcaggagtcgcgcttcccagaggcagcggaatcgtaaccaggtgtccgctggtgctgaaactgaaaaagcagccctgtgaggcatgggccggaaggatcagctaccggaacaccgagctagagcttcaggaccctggccaggtggagaaagagatacacaaagcccagaacgtcatggccgggaatggccggggcatcagccatgagctcatcagcctggagatcacctcccctgaggttccagacctgaccatcattgaccttcccggcatcaccagggtggctgtggacaaccagccccgagacatcggactgcagatcaaggctctcatcaagaagtacatccagaggcagcagacgatcaacttggtggtggttccctgtaacgtggacattgccaccacggaggcgctgagcatggcccatgaggtggacccggaaggggacaggaccatcggtatcctgaccaaaccagatctaatggacaggggcactgagaaaagcgtcatgaatgtggtgcggaacctcacgtaccccctcaagaagggctacatgattgtgaagtgccggggccagcaggagatcacaaacaggctgagcttggcagaggcaaccaagaaagaaattacattctttcaaacacatccatatttcagagttctcctggaggaggggtcagccacggttccccgactggcagaaagacttaccactgaactcatcatgcatatccaaaaatcgctcccgttgttagaaggacaaataagggagagccaccagaaggcgaccgaggagctgcggcgttgcggggctgacatccccagccaggaggccgacaagatgttctttctaattgagaaaatcaagatgtttaatcaggacatcgaaaagttagtagaaggagaagaagttgtaagggagaatgagacccgtttatacaacaaaatcagagaggattttaaaaactgggtaggcatacttgcaactaatacccaaaaagttaaaaatattatccacgaagaagttgaaaaatatgaaaagcagtatcgaggcaaggagcttctgggatttgtcaactacaagacatttgagatcatcgtgcatcagtacatccagcagctggtggagcccgcccttagcatgctccagaaagccatggaaattatccagcaagctttcattaacgtggccaaaaaacattttggcgaatttttcaaccttaaccaaactgttcagagcacgattgaagacataaaagtgaaacacacagcaaaggcagaaaacatgatccaacttcagttcagaatggagcagatggttttttgtcaagatcagatttacagtgttgttctgaagaaagtccgagaagagatttttaaccctctggggacgccttcacagaatatgaagttgaactctcattttcccagtaatgagtcttcggtttcctcctttactgaaataggcatccacctgaatgcctacttcttggaaaccagcaaacgtctcgccaaccagatcccatttataattcagtattttatgctccgagagaatggtgactccttgcagaaagccatgatgcagatactacaggaaaaaaatcgctattcctggctgcttcaagagcagagtgagaccgctaccaagagaagaatccttaaggagagaatttaccggctcactcaggcgcgacacgcactctgtcaattctccagcaaagagatccactgaagggcggcgatgcctgtggttgttttcttgtgcgtactcattcattctaaggggagtcggtgcaggatgccgcttctgctttggggccaaactcttctgtcactatcagtgtccatctctactgtactccctcagcatcagagcatgcatcaggggtccacacaggctcagctctctccaccacccagctcttccctgaccttcacgaagggatggctctccagtccttgggtcccgtagcacacagttacagtgtcctaagatactgctatcattcttcgctaatttgtatttgtattcccttccccctacaagattatgagaccccagagggggaaggtctgggtcaaattcttcttttgtatgtccagtctcctgcacagcacctgcagcattgtaactgcttaataaatgacatctcactgaacgaatgagtgctgtgtaagtgatggagatacctgaggctattgctcaagcccaggccttggacatttagtgactgttagccggtccctttcagatccagtggccatgccccctgcttcccatggttcactgtcattgtgtttcccagcctctccactcccccgccagaaaggagcctgagtgattctcttttcttcttgtttccctgattatgatgagcttccattgttctgttaagtcttgaagaggaatttaataaagcaaagaaactttttaaaaacgt

SEQ ID NO: 636 - DNA, 4127 bp, HOMO SAPIENS
gtgctccgctggttgaaagcggatccgggctggaggcggtgtcacggtgtatgaatattgattacgcgtcgcagcgcccagggcccagcgcccagcctccagtgcccgcccctctcggccgcccgacgctctctgctcgcgcttgggctcgcgatggggaagaagtcccgggcggtacccggccgtaggcccatcctgcaactctctccgccgggtcctcggggcagcacgccgggccgggacccggagccggaacccgacactgagccggactcaaccgcggcggtccccagccagcccgccccgtcggcggcgacgaccaccaccaccgcggtgactgccgccgcggcctcggacgactcgccttcagaagatgaacaggaagcggtgcaggaggttcctagagttgttcagaatcctccaaaaccagtcatgaccactagacccacagctgttaaagcaacaggcggtctatgcttgcttggtgcttatgctgacagtgatgacgatgacaatgatgtttccgaaaaactagcacaatccaaagagacaaatggaaaccagtcaactgatattgatagtacattggccaacttcctagcggagatcgatgccataacagctcctcagcctgcagctcctgtaggagcttctgctccacctccaactccacctcgaccagagccaaaggaagcagcaacatctaccctttcttcttctacttcaaatggaacagactccacccaaacatctggttggcaatatgatactcagtgttcactggcaggagtcggaattgagatgggcgattggcaggaagtctgggatgagaacacgggatgttattattattggaatacacaaacaaatgaagtgacttgggagttaccccaatatcttgccacacaggtacagggattacagcattaccagcccagttctgtgccaggtgctgaaactagttttgtggtaaatacagacatatattctaaggagaaaacgatttctgtttccagtagtaaaagtggaccagtcatagccaagcgagaagttaaaaaggaagtaaatgaaggaattcaggctctctcaaatagtgaggaggagaagaaaggggtggcagcatcgctgcttgctcctttattgcctgagggaataaaagaagaagaagagagatggagaagaaaagtaatttgtaaagaggagccagtttcagaagtaaaagaaacaagtacaacagtagaagaagcaacaacaatagtaaagccacaggaaattatgttggacaatatagaagacccttctcaggaggatctttgcagtgttgtccaatctggagaaagtgaggaggaagaggaacaagatacccttgaactggagctagttttggaaaggaaaaaagcagagttgcgagccttggaggaaggagatggtagtgtgtcagggtctagtccacgttctgatatcagccagccagcatctcaagatggaatgcgtaggcttatgtctaaaagaggaaaatggaagatgtttgttcgagctaccagtccagaatctaccagtaggagttctagtaaaactggacgagatactccagaaaatggagaaactgcaattggtgctgaaaattcagaaaaaatagatgagaattcagataaagagatggaagtagaagaatctccagagaaaataaaagtacagacaacaccaaaagtagaagaagaacaggatttgaaatttcagattggagaactggcaaataccctgacaagtaaattcgagtttctaggcattaatagacaatccatctccaactttcatgtgctgctcttacagactgagactcgaattgcagactggcgggaaggggctcttaatggaaactaccttaaacgaaaacttcaggatgcagcagaacaactaaaacagtatgaaataaacgccactcctaaaggctggtcctgccactgggacagggatcatagacggtatttctatgtaaacgaacagtcgggcgagtctcagtgggagtttccagatggtgaagaggaagaagaagaaagccaagcacaagaaaatagagatgagactcttgccaaacagaccttgaaagacaaaactggcactgattcaaattcaacagaatcctctgaaacttccacaggttctctttgtaaagaatccttttctggtcaagtttcttcttcatcactcatgccacttactccattctggaccctccttcagtcaaatgttcctgtgcttcaacctccattacccttggaaatgccaccacccccacctccacctccagaatcacctccaccccctcctccaccacctcctcctgcggaagatggtgagatccaggaggtagagatggaggatgagggaagtgaggagccccctgccccaggaacagaggaagatacccctttgaaaccttcagcacaaaccacagttgtaactagccagagttcagttgattccaccatctctagttcttcttccactaaaggaataaagaggaaagctacagaaattagcactgcagtggttcagaggtcagctaccattggcagttctccagttctctatagccagtcagctatagctacaggtcaccaggcagcagggattggaaaccaggcaacaggaattggacatcagacaataccagttagccttccagcagcaggaatgggtcatcaggccagaggaatgagcctgcagtcaaattaccttggactagcggcagcacctgcaattatgagttatgcagaatgttctgtcccaattggagtgactgctccctcattgcagccagttcaggcccgaggtgctgtgcctaccgctaccattatagaaccaccaccaccacctcctcctcctcctcctccaccaccaccagctcccaaaatgccaccacctgaaaagacaaaaaaaggaaggaaagacaaggcaaagaagagtaagaccaaaatgccatctttggtaaaaaagtggcagagtatccagcgtgagttagatgaagaggacaattctagttccagtgaagaggatcgggaatcaactgcacagaagcgaattgaagagtggaaacagcagcagctggttagtggcatggcagagagaaatgctaattttgaagcccttcctgaggattggagagcaaggctgaagagaaggaaaatggctccaaacacatagtttttaagtttttaaaacttttttgtattattgtttgttttgtgttcagttcaaagtcttaaccagttttattgtcaaataaactataaatgttatgggggagatcttataaatttcctgggcaagagtgtatgcatacaaagttttcacttttgtgaaatgtaatttttctgtttttgcaaagggatgaggtgattggaattgctttgaccatgctgcctttattctcaaactggcaaacttagcatgttaggtgtattaacctcatcagtcttgaagaacatgtggctcatgagtataacacttctgtagaggactccctgacaaaagtgaagaattaacttctcctccagaacaagtgcaattcagaaggcagctctgcattctaccttgcttgactggaattgtctgaagctttttctggcctcttttctctagtcggccacccctgaagtgctgaggtctaagtggtttacctcgtgctgatagatggccacactctttagagtagttctcataagttctagaactggtagctcggtcgtttcgcacactaggtggcatacaggcagcagcaggtgttcatatccttgattttgagaatttcccctcaagtatgtggcagtaaatacaacaagacactctatgtattaatgtctccattgtcttaaccctgttccaaaacaaaattcacctcctttctttatgtgaatgtattctccataaaattccagtatttaaaaagcagtttactgttctgtactttctgttgtatcacaatcaggtaaaagtcactttaaactgaggaaacggcaaattgtgttttaaagctctttgtatttctccagtttctgaccttgtaaatttgtatatatgcactaataaagctttttttataatcctgaaaaaaaaaaaaaaaa

SEQ ID NO: 637 - DNA, 1498 bp, HOMO SAPIENS; identical to SEQ ID NO: 97

SEQ ID NO: 638 - DNA, 3924 bp, HOMO SAPIENS
agtgatgaactcatgctctgttctgttttctcaaagctgaagtcggctaggtttgcaaagctgtgggctgagcactcaggcaatcacactctcagaaactgcggcggctctggactgcagcctcccaaggctccatgccagacaaagcatgcgtgtcacacttgctacaatagcctggatggtttcttttgtctccaattattcacacacagcaaatattttgccagatatcgaaaatgaagatttcatcaaagactgcgttcgaatccataacaagttccgatcagaggtgaaaccaacagccagtgatatgctatacatgacttgggacccagcactagcccaaattgcaaaagcatgggccagcaattgccagttttcacataatacacggctgaagccaccccacaagctgcacccaaacttcacttcactgggagagaacatctggactgggtctgtgcccattttttctgtgtcttccgccatcacaaactggtatgacgaaatccaggactatgacttcaagactcggatatgcaaaaaagtctgtggccactacactcaggttgtttgggcagatagttacaaagttggctgcgcagttcaattttgccctaaagtttctggctttgacgctctttccaatggagcacattttatatgcaactacggaccaggagggaattacccaacttggccatataagagaggagccacctgcagtgcctgccccaataatgacaagtgtttggacaatctctgtgttaaccgacagcgagaccaagtcaaacgttactactctgttgtatatccaggctggcccatatatccacgtaacagatacacttctctctttctcattgttaattcagtaattctaatactgtctgttataattaccattttggtacagcacaagtaccctaatttagttcttttggactaatacaattcaggaaagaaaaaacccaaaaaccaacctcattcacatatggctttttttttaaccaataacaattaggtgtacttctattttaaaacatttcagaaaaaaatatatgttatagcaatactcttactcaaaagaagaaatttcctaactctatcagataaactcatctttagtataaataagcattatttgcaggttgccacaggtggacttttagtaagtaacctaacccatgtttcagcttctaaatctgcaaaatgagcaaggtacagtagcacatttttaggtgattcttagtaactccagtagccttcattagttaaaaacattattattttttgcatgctgcttcgactctaaatatctggttttccctgtctttttggtttactacttccccagattcagaacagaggagtaactaggggatctgattttagaggccttaattttctgttcatggactgttaaaagtaaaaccaaactttcaaaagggataaacctaaatatttacttgttatcattagagagggaacatcaaatgctgggacatcattactaaccaatagcatcagacactggatttaatggataatcacaatggtcgtaatgtatacaaagacttatataccactttctcgtataaatttttcaaaaaatacaataataatataatttataaagaacactcttctatgaacaaccaccaccaccaaaaaaaaaaaaagccctcagaaaatttctcacaaataaggcaactaatgcctgatatctcaaaatcctttacaaaaggagatagttctagtcaaggagttttgggtatgttacttttttttcttctttttcttttcatctgcctccatcttaagtgcaatttcttcagctgtaagagctcccagtttcttattctttgctttcttaaccttttccttgatgctggccacatcaattttagtttcagtagaagctagacaaattaaaagcacaacacatgtaatactttagattttaccaagtaaaacaaagaatatatgtttaacaaagaatatatgtttaaggcagttaacttcagagtattcttataattgaataattgaaaggtgatcacagtataaaatataaaaacacttgcctaaagcagttagaaatttcttcagattaagataaaacaaatcataaaatactttatatattagtacaagtatacataaaaatggcataaatggcataattgaaccaattactggattcaactatattaagactatttccttaaatcctacttcagactaaattattttacctacattcttttccatattttggaacttctgagtcattattttccatcttgcacattaaaataatttaaaattacatgtatcccttctcaataagtttaatcagctaaccctaagctagaggtcaaaatctacttcctctaatatcaaaacgaaaatttaaagttttccaaatattaattcaatattaattgaatattcaatgaattaattcatttaatgttagattaattcattgaatattaattcaatgaatgactaattaatagtattttaacaagattttggtatatttaacaacattttggtaataaagacaataatttgagagtgtgtggaagtccccctaatagaagccaactatctaatcaatgccaaaagtgtgaacaaaatagagaaaggaagcagtgaaaaagaatgcaactttttcttaccattcaaagtacaggatcacagcataaaagaatcataagataaaacatcaaactacccagcaacctgagaagcacagagtgttaaagcctccaccgtgtggagaaactaaattagggtaactagctattgagtatattgagtaccttcaaagcactcaactgacaggttttacagactggaaattataatacttatgacatttctaccttttatataaccaataatctaccatagaatgtagtatttttaaagctattaacaagcaatatattaaaataataatgtattatatctgtttctgacccagtctatgtacaatattgctggtgagccctctcccttcagtgtgtcactgttcactttggagggttactttaggaagaggataagtgttaccacaggggaaaaaaatgcagaagaggatgcatcagaagaaatggcatgacaatgttttctcttagtgtcttttaaatactaggttagtgcgaaagtgatttctgccatttaaaaaccacaatcactttcgcactaatagctcctgaataagacctgtcagcatcctttagtctaaggtgatgagaaatccatgttaccgatatagaagccaaactctaagccaagatcacataaagagaagaaaaagtacaacttctgataattcctctttgagaggcatgacagcagagctcagggatcttcttgcatttctacagaagatgcactggctgccctgggtttgtatctttcacaacaaagagtcttttccaagcacagaccagaggtcaggagaggactgtcaatccagtttgcactgaaataggcattagctgcctctaaattataaattatctcagccatcccttgtccttaggattagtaattaatgaaatgctaagagaactgatgaaaagatacaactgtttcttaaaaagattcagacaaatttattatgggtttacttttcctaattaataaagacttttacatcatagaaagcattaccttccttaggtttcacaattggtttttccttaggtggaataaatgctttgtttctttcctcttgtctcttactgatggcttctgcttgtttagcctacattaataaataaaaaatatatcagttaaatgtatttatagttaaataattcaagtatctatgaactttgctattcatgtgagccagacataaagtgccgtacctttattgcttccaaaaaaaaaaaaaaaaaa

SEQ ID NO: 639 - DNA, 4205 bp, HOMO SAPIENS
gaagcgggctgggaggcgtcggcggcggcagcgcacgtggtgacgtgcgagggggtgcggcgcgagcggtcggcggcggcggaggcagtgtctcccggtcgcgcgtggaggtcggtcgctcagagctgctgggcgcagtttctccgcctgctgcttcggcgcggctgtatcggcgagcgagcgagttcccgcgagttctcggtggcgctcccccttcctttcagtctccacggactggcccctcgtccttctacttgaccgctcccgtcttccgccgccttctggcgctttccgttgggccgattcccgcccgcttcctcctgcttcccatcgaagctctagaaatgaatgtttccatctcttcagagatgaaccagattatgatgcatcattatcacagaagaaattcgtgtctatagcttttaaggacttgattacatcattttcaagcctgatagttttggaatcaccattagagcttaagacacacctgccttcatttcaaccacctgtcttcataccctgacgaagtgcaccttttaacactcctttgtccttggattacttaagagttcccagaaatacatttgccaccaacagagtagccaaatttataaggaaaaatgattcccaatggatatttgatgtttgaggatgaaaattttattgagtcttctgttgccaaattaaatgccctgaggaaaagtggccagttctgtgatgttcgacttcaggtctgtggccatgaaatgttagcacacagagcagtgctagcttgctgcagtccctatttatttgaaatctttaatagtgatagtgatcctcatggaatttctcacgttaaatttgatgatctcaatccagaagctgttgaagtcttgttgaattatgcctacactgctcagttgaaagcagataaggaattggtaaaagatgtttattctgcagcaaaaaagctgaagatggatcgagtaaagcaggtttgtggtgattatttactgtctagaatggatgttaccagctgcatctcttaccgaaattttgcaagttgtatgggagactcccgtttgttgaataaggttgatgcttatattcaggagcatttgttacaaatttctgaagaggaggagtttcttaagcttccaaggctaaagttggaggtaatgcttgaagataatgtttgcttgcccagcaatggcaaattatatacaaaggtaatcaactgggtgcagcgtagcatctgggagaatggagacagtctggaagagctgatggaagaggttcaaaccttgtactactcagctgatcacaagctgcttgatgggaacctactagatggacaggctgaggtgtttggcagtgatgatgaccacattcagtttgtgcagaaaaagccaccacgtgagaatggccataagcagataagtagcagttcaactggatgtctctcttctccaaatgctacagtacaaagccctaagcatgagtggaaaatcgttgcttcagaaaagacttcaaataacacttacttgtgcctggctgtgctggatggtatattctgtgtcatttttcttcatgggagaaacagcccacagagctcaccaacaagtactccaaaactaagtaagagtttaagctttgagatgcaacaagatgagctaatcgaaaagcccatgtctcctatgcagtacgcacgatctggtctgggaacagcagagatgaatggcaaactcatagctgcaggtggctataacagagaggaatgtcttcgaacagtcgaatgctataatccacatacagatcactggtcctttcttgctcccatgagaacaccaagagcccgatttcaaatggctgtactcatgggccagctctatgtggtaggtggatcaaatggccactcagatgacctgagttgtggagagatgtatgattcaaacatagatgactggattcctgttccagaattgagaactaaccgttgtaatgcaggagtgtgtgctctgaatggaaagttatacatcgttggtggctctgatccatatggtcaaaaaggactgaaaaattgtgatgtatttgatcctgtaacaaagttgtggacaagctgtgcccctcttaacattcggagacaccagtctgcagtctgtgagcttggtggttatttgtacataatcggaggtgcagaatcttggaattgtctgaacacagtagaacgatacaatcctgaaaataatacctggactttaattgcacccatgaatgtggctaggcgaggagctggagtggctgttcttaatggaaaactgtttgtatgtggtggctttgatggttctcatgccatcagttgtgtggaaatgtatgatccaactagaaatgaatggaagatgatgggaaatatgacttcaccaaggagcaatgctgggattgcaactgtagggaacaccatttatgcagtgggaggattcgatggcaatgaatttctgaatacggtggaagtctataaccttgagtcaaatgaatggagcccctatacaaagattttccagttttaacaaatttaagaccctctcaaactaacaggcttagtgatgtaattatggttagtagaggtacacttgtgaataaagagggtgggtgggtatagatgttgctaacagcaacacaaagcttttgcatattgcatactattaaacatgctgtacatactttttgggtttatttggaaaggaatgcaaagatgaaggtctgttttgtgtacttttaagactttggttattttactttttggaaaagaataaaccaagaattgattgggcacatcatttcaagaagtcccctctcctccacatttgttttgccaatttgcacattaaatgactcttccctcaaatgtgtactatggggtaaaaggggtagggtttaaagatgtagacagttgggttttttaagggccctttttcaataactggaacactctataacaaaggatacttatttaaatagatgacattgactatttttgtttttattaaaaggaagcttacatgcctaccaatatttaatcttttatgattgcctttttataactttttatattctcagcagagtgctttaccaattgaagtaaaatgtggcaggctggagttattgaagcagagtggcagtcttcagtttgcagagtaggggtctgtcttttaaactctgagtgcaaacttcagagttcttgccttggctgcagtttttttccttcaagaatgcagtactaacatttatttgagtggagttactgaacagtaacatagctgtgatttttggtatttgaaacactggttttaaatattttgacttgttgagggtatgttttatatagcaagacattatatagcagtaaaaaatggtgttttatcttctatataattcctgtttttattattaacaaaacagtcctaaatagcagccctcaattgtgaaaaaatttactttaaactacattaggttgtgaatgcaggttttatcagaactatgtttttgttcagtttatctgttcatatggataaatattggttgggatgacttggtgtctaatgtgtagtgctacacacctaacttatggggccaaaatagcatgtcctaatgcttgctgctgatttaaacacattaaaggtactttgcaggaaatccttgcaccatgggattaatatccaattgctgcttgtacactcattcattactaaaagttttgagaaatttttttttccagtaatgagcttaagaaatttgtggaaaataactcacctggcatcttacatctgaaataaggaatgatataaggtttttttttctcacagaagatgaagcacacaggaacctaatgggccaactgggatgaggtgactattctgagatgactattcagtggctaacttgggttaggaagaaaataattaggtattttctccaaatgttcactggtactctgccactttatttctctcatctgttacacaaagaaccaccaggaaagcaaatcagtttggttggtaactctgtaattcctaactatcactggtttggttctggactaaaactacattgacagattgaatttgcctaatatgatgactgtttttaatatggatctgtatgtgttctattcagcacaaggaaataaaattttagttgaggattcagcactaaaaaaaaaa

SEQ ID NO: 640 - DNA, 2299 bp, HOMO SAPIENS
ggggcctgggccggcgccgggtccggccgggcgctcagccagctgcgtaaactccgctggagcgcggcggcagagcaggcatttccagcagtgaggagacagccagaagcaagcttttggagctgaaggaacctgagacagaagctagtcccccctctgaattttactgatgaagaaactgaggccacagagctaaagtgacttttcccaaggtcgcccagcgaggacgtgggacttctcagacgtcaggagagtgatgtgagggagctgtgtgaccatagaaagtgacgtgttaaaaaccagcgctgccctctttgaaagccagggagcatcattcatttagcctgctgagaagaagaaaccaagtgtccgggattcagacctctctgcggccccaagtgttcgtggtgcttccagaggcagggctatgctcacattcatggcctctgacagcgaggaagaagtgtgtgatgagcggacgtccctaatgtcggctgagagccccacgccgcgctcctgccaggagggcaggcagggcccagaggatggagagaacactgcccagtggagaagccaggagaacgaggaggacggtgaggaggaccctgaccgctatgtctgtagtggggttcccgggcggccgccaggcctggaggaagagctgaccctcaaatacggagcgaagcacgtgatcatgctgtttgtgcctgtcactctgtgcatgatcgtggtggtagccaccatcaagtctgtgcgcttctacacagagaagaatggacagctcatctacacgccattcactgaggacacaccctcggtgggccagcgcctcctcaactccgtgctgaacaccctcatcatgatcagcgtcatcgtggttatgaccatcttcttggtggtgctctacaagtaccgctgctacaagttcatccatggctggttgatcatgtcttcactgatgctgctgttcctcttcacctatatctaccttggggaagtgctcaagacctacaatgtggccatggactaccccaccctcttgctgactgtctggaacttcggggcagtgggcatggtgtgcatccactggaagggccctctggtgctgcagcaggcctacctcatcatgatcagtgcgctcatggccctagtgttcatcaagtacctcccagagtggtccgcgtgggtcatcctgggcgccatctctgtgtatgatctcgtggctgtgctgtgtcccaaagggcctctgagaatgctggtagaaactgcccaggagagaaatgagcccatattccctgccctgatatactcatctgccatggtgtggacggttggcatggcgaagctggacccctcctctcagggtgccctccagctcccctacgacccggagatggaagactcctatgacagttttggggagccttcataccccgaagtctttgagcctcccttgactggctacccaggggaggagctggaggaagaggaggaaaggggcgtgaagcttggcctcggggacttcatcttctacagtgtgctggtgggcaaggcggctgccacgggcagcggggactggaataccacgctggcctgcttcgtggccatcctcattggcttgtgtctgaccctcctgctgcttgctgtgttcaagaaggcgctgcccgccctccccatctccatcacgttcgggctcatcttttacttctccacggacaacctggtgcggccgttcatggacaccctggcctcccatcagctctacatctgagggacatggtgtgccacaggctgcaagctgcagggaattttcattggatgcagttgtatagttttacactctagtgccatatatttttaagacttttctttccttaaaaaataaagtacgtgtttacttggtgaggaggaggcagaaccagctctttggtgccagctgtttcatcaccagactttggctcccgctttggggagcgcctcgcttcacggacaggaagcacagcaggtttatccagatgaactgagaaggtcagattagggcggggagaagagcatccggcatgagggctgagatgcgcaaagagtgtgctcgggagtggcccctggcacctgggtgctctggctggagaggaaaagccagttccctacgaggagtgttcccaatgctttgtccatgatgtccttgttattttattgcctttagaaactgagtcctgttcttgttacggcagtcacactgctgggaagtggcttaatagtaatatcaataaatagatgagtcctgttagaatcttgaaaa

SEQ ID NO: 641 - DNA, 3251 bp, HOMO SAPIENS
gttgtaggcagtcggggatgccatgtccttggttccattcctgcgtgagtctgcagaaggcacacactttgtaagagtagagtggactagtgccagcctgaataggtttaaaactgcaaacagttggagaacatggaacaggttggtgcaggaagcctaagattttgcaatcatattataacattggcttttgacaacataaatgttgtatcttccctaaggtcaggtcggggaaagaaagacttccagcttcttacctctgcgtgcatgggcacgtgtgcattgctcagtccgcaggaggtctcactccgcaggaaacgctctcctcccgcataagtctgtacttccatcccctcatctgtggtagtagtgaaggctaggtgagtaagcgtgggctgttctacccaccagaagtccaggagctgttgtatacctcatttctaactcgtgaccgagtgacttgctttaactttctcgaaatcctacagagttgccaagtctgccctccctcctcagtcatgttaaactctggcctatagcatcatgggacctgtagcctagggtgggaccccctaaagcctctgaatgtcgctgcttaaaagctactgcaaactgagggcaaattgcaatcttctattcctttttgttgcaaggggtcttcacaggtctcttaacatctgctttccctgccaccctgcctttaggggctggccagctatccacacccctaacccaccctgtgtttctgacagctggccacacgtcaacttctgtacttgccttttccttggtggggtagaggccaaccccttctcctctgaggcctcagggttctgtttcttttcaggactttgggtagaagggaagacaccaaaggctcctttaagctgactgctgcatacacatttcactttttttcctttgacatgaccaaaaatatccaaatatttaagtttattattattattattattatttgacaatcttatatccaatgggctctctagaagctgcatccccagccctttcaccttttctttgaatgtagttcccaaccttcaattcccacccctaatgctgacaaaaagcttagccaggtcatgatactgctgctataagccaggggagggtggtttctttgttttgttttgttttgttttgttttttaaatttccagccaaaaccaaagatttcttaatgattgtataaactcaaaacaaacaaaagaaccaaagaaaagggaagtcttcagcatcagtccagtctgtggtgtcctggcacttagaagagtgaggccagggaaggtggggcggggggaccctctgactggatcagaaagggcaggcaagctgcttaccaccttccagggtccagcacaggtgcatgcccctagctttggccctcacaaacttgtgagcatgccctgaaacaaattggcatttcagattttccaaaacaaaagtcaaaaaaccccatcaccaccatcatccaccctacaccaaccagggtcactatggggacttagcacagggcctagggagggtgggagctgctgctggactggcccgaggactccacagagtgggggacgttgaagacactggcgcacgattggctgctctgctgggtgctttaacctctggggctgggcgaatgcacgccacggtgcccttctgagcctttttttcttttcctgtactggaactgcttggaagtggctgtcctgtttgtgagaaaacatgcagaaagattatcaagcttttcatttctctttattgtagttttctttcctttttgcagcaccactgtgcaactatgcattgtacttcacaaccttttgtgctaggtagatgcctgtgactttttaacttggggggtggggggattgcaaatgaaggaactttttacatggatctttttaatctcagttggttgggggaggggggtacttggttcttgggtcacacaagctctatcccaaagcaaaatccaaatgttaataatattagcctgatgcagataccaaagataatttctttcctgcagaaccttagactcgtgtattaagtacgattacccagcacttgcattagtctaacctcagtaattccaaagcttagatgtatattttggtatatttctgggatattaaaaaaaatgtcgtttaacttcttgtttgtttcagtgtaatgctcttaaagtcatagcatgaaaataattgaactgtcctattcttagtagtttgaaataatagtatttttgtatgttttgggtgtgtctatgtatgtattaacataacagttttcactgcctaggtgttcataataaaaaagaaaatgaaaaaagttctgagtgtacataatattcaataataatctcccaccaggtgtcaatttagattgcatattcctcattactgttcccaactgggattttgttttcttttaaagagacagtgatcgtgtttttctaaagatgttttctttctctctttcaatatcttaactcactttttttttcttccttttttgtcttaattattaattcaggggtgtttgtccactgttgtcaaaggaggggcacaaggggaattggcccccggcctcctagaactttttgttttatgtactttaaaatgtgagtttgagttcttctttgtggaaacttaagatgtggtgtaaatgattctttccaaaattgtccagcagcttgaatgaggcagtgacaattctgaggtggtttattgggagtccttctacatttctcttagataactctgcactctgggtggctattgtgtagccttactgccccagagtgcctgttagccaaatatttcccctctgataggaatattttctaagaatcagctgataacttgcgtgctggaccttgttatctgtgcccctgggagacacacgttttcttggttttgaaaacctgaaacacaggcaactttacattttggggaattagctgatgcctcctgaagcctgaggaggtggcggggaatatgagcggtgctgtctctctcaaaagtgccctttagatgattccccctcctagggctgcctgcaggggctgtaggcttgggaaagattgtgtaggtgacagtgaatcagaatgaagtggtagattttgtgtagatgcatttgtctgctgtaattttttatatatatattaaacttactgtaactgtacagttcatttctgttgtaaaacatcattaaaccatcttccaagtgttttca

SEQ ID NO: 642 - DNA, 908 bp, HOMO SAPIENS
ggccgagtccccgccccgccacttccggtcccgccgccgggagccggtgcggctgtgaggggccgcgtctcgcagcagccgcccggaccgggcatggtgttgggcgccgggcccgcctcgcctgtctcggggagcccagggtaaaggcagcagtaatgctaacgctagcaagtaaactgaagcgtgacgatggtctcaaagggtcccggacggcagccacagcgtccgactcgactcggagggtttctgtgagagacaaattgcttgttaaagaggttgcagaacttgaagctaatttaccttacagggtctctctttgttgcccaagttggagtacagtggcatgagtgtggctcactgcagtctcaacctcctgggctcaagtgatcttcccacctcagtctcctgagcagctgagacctcagacctcaggtacatgtaaagtgcattttcctgatccaaacaagcttcattgttttcagctaacagtaaccccagatgagggttactaccagggtggaaaatttcagtttgaaactgaagttcccgatgcgtacaacatggtgcctcccaaagtgaaatgcctgaccaagatctggcaccccaacatcacagagacaggggaaatatgtctgagtttattgagagaacattcaattgatggcactggctgggctcccacaagaacattaaaggatgtcgtttggggattaaactctttgtttactgatcttttgaattttgatgatccactgaatattgaagctgcagaacatcatttgcgggacaaggaggacttccggaataaagtggatgactacatcaaacgttatgccagatgataaaaggggacgattgcaggcccatggactgtgttacagtttgtctctaacatgaaacagcaagag

SEQ ID NO: 643 - DNA, 1068 bp, HOMO SAPIENS
catcacttttatctctttaatagaaattggttaaattataatcaatataaggaggttacaaaactccatatacaacactgtatacattttcttggaaaaatatgtgcaactgctctgcaaaatacatgattaactagcctgtgtgatgggataacattgtagtttcttaatttcttgtcctttcttgtatttcccacagtattgatgtatatcttctgcgttcaaaagcaattttttaaagcctcataacgtggtaacaaaatactatgcacgttacaaaattcagaacacggaaacaagaagctcgctttttttttccccctatttcggtttggccctttagatttcccctcccccaccggggcgggacttcccgccgacttctttcaggttctcagttcggtccgccaactgtcgtataaaggcgctgcctcaggccagagtcctcacaaagcgttgggtgagactcctcttgctcgtcatgtctggccgcggcaaaggcgggaagggtcttggcaaaggcggcgctaagcgccaccgtaaagtactgcgcgacaatatccagggcatcaccaagccggccatccggcgccttgctcgccgcggcggcgtgaagcgcatctccggcctcatctacgaggagactcgcggggtgctgaaggtgttcctggagaacgtgatccgggacgccgtgacctatacagagcacgccaagcgcaagacggtcaccgccatggatgtggtctacgcgctcaagcgccagggccgcaccctctacggtttcggtggttgagcgtccctttctatcaacaaaaggccctttttagggcccccactttctcagctgaggagccgtgatgcttgtttgcccagtttctctttaccatttgttcgcgcctgctgagtttgtgctgctatcggagcatgcgtctctagtcgctgtaagtaggcatcagtcactaatcgctctccagtaaataaaatacccaacacaacttgtttcaggtgctccagagcttactgacatgggccgtcgcgcagactgtagtgcagtgtcatcatggctca

SEQ ID NO: 644 - DNA, 2029 bp, HOMO SAPIENS; identical to SEQ ID NO: 278

SEQ ID NO: 645 - DNA, 491 bp, HOMO SAPIENS
ggggaagcggcggcaggcgccatgtccggccgcgaaggtggcaagaagaagccactgaaacagcccaagaagcaggccaaggagatggacgaggaagataaggctttcaagcagaaacaaaaagaggagcagaagaaactcgaggagctaaaagcgaaggccgcggggaaggggcccttggccacaggtggaattaagaaatctggcaaaaagtaagctgttccttgtgcctgaggagatggtgaccctttatttcatctgtatttaaacctctctattccctgccataacatcttttgccacgtatagctggaattaagtgttgtcttggagctgttgtacatttaagaataaacttttgtaaaaaaagaaaaatcttacagtggctcatcatctctttagttgttttcactaagtcattcctaccataactgtgaatttaaagtaaaaccagctcagaatccaaaaaaaaaaaaaaaaaaaaaaaaaaa

SEQ ID NO: 646 - DNA, 1648 bp, HOMO SAPIENS
ggtgcgaggaggcgccgccatcttggggctgctgggactcgcgtcggttggcgactcccggacgtaggtagtttgttgggccgggttctgaggccttgcttctctttacttttccactctaggccacgatgccgcagtaccagacctgggaggagttcagccgcgctgccgagaagctttacctcgctgaccctatgaaggcacgtgtggttctcaaatataggcattctgatgggaacttgtgtgttaaagtaacagatgatttagttagacagtgtcttgctctattgctcaggctgcagtgcagtggcatgatcatagctcactgcatcctcgacctcctgggctcaagcggtcctcttgcttcagcctcctgaatagcagagactacagtgtttggtgtataaaacagaccaagctcaagatgtaaagaagattgagaaattccacagtcaactaatgcgacttatggtagccaaggaagcccgcaatgttaccatggaaactgagtgaatggtttgaaatgaagactttgtcgtgtacttaggaagtaaatatcttttgaattagagaaagtgttgggacagaaagtactttatgtaactaagtgggctgttcagaagcttagaggtcattttttgtaattttctttttaattactttagagagctagggatgcaaatgttttcagttagaaagcctttatttacttttggaaattgaacaagaaatgcatctgtcttagaaactggagattatttgatgttaggtaaaacatgtaattgtttctctggcaaatttgtatcagtaatttgaaaatgagatattaggaaaaaccaattcttcttaaatttagttcatctttctttaaaagaacattaaatgtaaccattttgtcagatccatgtattttggagcataaaatgtatgctgttgtgaccaataaatataaaatatggtaattggaattaactccacaccatagtatgcattgttatacatactgtgtacctaattatgtatagcagtgtagtctcaattatatctgaaagtaattgtgactaacaagtatgctttgccttatttccacatttaaactacctgttaatataagggatttgtagtatcagcttgttgagcaatgactttgaatctagttttcagtgatcagaagcagcagttatttgagtgtatgaatggaatgatgatcactgtgctataatgtactgaaaccaccatattacagaaatatttactacatattttccatctgtagtttctcagaagggctatggattagtttgaactgtcaaatccttgcatacttctgtgacacccctgcccattttctgtctttaattaaccaaggtgttaggtgtgactgtcacaactgttatgttttccagtaaactagaagtacgatatttgataattatatttgtatttcaccacctaaatgtaatgttgattcctcaagaatgaaatgaaggcactacattgaaatatgttttgtataaatttgtcatgttgaacagcattttagcatggtaagttcccttagctatatgaattttggcatgtttcagagagatcagtaaataaaatattagataaaatataaaaaaaaaaaaaaaaaaaaaaaaaaaaa

SEQ ID NO: 647 - DNA, 370 bp, HOMO SAPIENS
atggtcctgcgtttgacacaccaacataggctttcctacaatacaacctctaacaaaactaagctgtctggaacccctggtaatagaatcatttacctttataccaagaaggttgggaaagcaccaaaatctacatgtggtatgtgcccaggcagactttgaggggttcatgctgtaagacctaaaattcctatgagattgtccaaaacaaagaaatatgtcagcagggcctatggtggttccatgtatgctaaatgtgttcatgacaggatcaagcatgctttccttatcgacgaagagaaaatcgttgtgaaagtgttgaaggcacaagcacagagtcagaaagctaaatagaaaatgaaacttatta

SEQ ID NO: 648 - DNA, 3099 bp, HOMO SAPIENS
aaactggccctggccctgaaccaaataccttgaaccctcgtaaactccataccctgacccccttgttttggatatacccaggtagaacaactctctctcactgtctgttgtgaggatacgctgtagcccactcattaagtacattctcctaataaatgctttggactgatcaccctgccagtcttttgtcttgggcaatctatacttttctcagaggttcccaaggcctactgaagggacttaacatactcttaatggctttcctctctcttgttttaccttatgccctcacttcctgagttaacctcccaaatacaggatcacctgtacccaagcccttagctcaagaatacaggatcacctgtacccaagcccttagctcaagctctgctttggaagaacccaaactaagacagtgctcctggtgccctccccaagcaacctcaagttctggctgttacttgagcagaggcctttcttttcccttcccccagctctatccatctgccaggcccccctcaaatctcttcatttccaagttttgcttgacttttccaagaggagagggctgcttcttagtatgtccctactcatcctttcctttcttgtcttgtatcctggtgcagcctggtaatggggcctcttcatggttgtgtgtcatgactccctaaccattatgcctccatgcatcccctgttcctcctggaacctagcaccatgccttacatggaaaagctgtcattgacagcccggtgagagccctgagggtggagtgactggggcagggcctgaggcaagaggtgggaggaggtaggaggccaggggctcagccggaccaggagactggaaacaggcaaggataaggcaggtgggggactgagttgtttgggtcacctctgcaggccagagagaccaggcaacatacacactgcagaaggtgggctgggaggattggggccagagctgggggagggatgagaacagaagcaggaccaggattcagcagagtcctcctatttccttccaccaccagggaatcttactgccccacttcagcttgtgctgtttcctggcaaggcaggctctcacatgcctggacgcctgggtgcgttggtgatgggaaggagcagggtgagggaggggccccaggagaggcccaggatgagcctcatcttgtccctccccattcttgtcttaccctctgcaaatgtgataggcacaggacaggagtaggcacctcgcctactgctgcttaacctttcagcttctccaggcccccaatcctgcttgctcccagcttggtaagtagatctgtgcacgtccctttacaccccaccatccagttttgcccagatgtgctagaatggggctggacaaagaaggaggggccagactagaggagtggtggtagagatagtgacagcctggggtgatgactttatgcctgtttaccactgagctctgggaaggaggccaggagtggggcaggtcaactgactgggagcaggggatctgggttccaagaaggagttgtgtttgaggtggggtctgggtcctcgtggaagtcaggactcccaggcagaaaagaggcaggctgcagggaagtaaggaggaggcatggcaccttctcatcgggcatcacaggtggggttttgccccacccctgaacgccctctgtggcgccttccacccacctgtaggcccagaaggatgtcggtctgctaccgtcccccagggaacgagacactgctgagctggaagacttcgcgggccacaggcacagccttcctgctgctggcggcgctgctggggctgcctggcaacggcttcgtggtgtggagcttggcgggctggcggcctgcacgggggcgaccgctggcggccacgcttgtgctgcacctggcgctggccgacggcgcggtgctgctgctcacgccgctctttgtggccttcctgacccggcaggcctggccgctgggccaggcgggctgcaaggcggtgtactacgtgtgcgcgctcagcatgtacgccagcgtgctgctcaccggcctgctcagcctgcagcgctgcctcgcagtcacccgccccttcctggcgcctcggctgcgcagcccggccctggcccgccgcctgctgctggcggtctggctggccgccctgttgctcgccgtcccggccgccgtctaccgccacctgtggagggaccgcgtatgccagctgtgccacccgtcgccggtccacgccgccgcccacctgagcctggagactctgaccgctttcgtgcttcctttcgggctgatgctcggctgctacagcgtgacgctggcacggctgcggggcgcccgctggggctccgggcggcacggggcgcgggtgggccggctggtgagcgccatcgtgcttgccttcggcttgctctgggccccctaccacgcagtcaaccttctgcaggcggtcgcagcgctggctccaccggaaggggccttggcgaagctgggcggagccggccaggcggcgcgagcgggaactacggccttggccttcttcagttctagcgtcaacccggtgctctacgtcttcaccgctggagatctgctgccccgggcaggtccccgtttcctcacgcggctcttcgaaggctctggggaggcccgagggggcggccgctctagggaagggaccatggagctccgaactacccctcagctgaaagtggtggggcagggccgcggcaatggagacccggggggtgggatggagaaggacggtccggaatgggacctttgacagcagaccctacaacctgctgcccttccctgtccctttccaccccccacccaccctccagaggtcagtgttctgggacatttggggacccttctttgactagagtttggatctggctgggtaggattactatacacttggggcaggcccaggctcctccaaactgagggattatgagggtggtgatggtccctgttaaggactattgtgtgcttgcaagttggcatgtacccatgtgccagcattgcttacttgttgccaatagctgttattgtgaaatacactgggaagccattagatgatgacttaagt

SEQ ID NO: 649 - DNA, 229 bp, HOMO SAPIENS
gccaccttagatgctggggctggcattgccctcaacgaccactttgtcaagttcatttcctggtaagacaatgaatttggctacagcaacagggtgggggacctcatggcccacatggcctctaaggagtaagacccctggaccaccagccccagtgacagaacaagaggaagagagagaccctcaatgctggggagtccctgccatactcagtccccaaccacactaa

SEQ ID NO: 650 - DNA, 5349 bp, HOMO SAPIENS
cttccctgtggcaggacttgggagcagtttccagccagaggctgccttgccaggggtggagaggacaaaggggaggccccacggtgcctactccgctgccactgtgtctctctgcagctcctgggcttcttcaagggaatgagcttccccattgccagcatagctgtggtcaactctgtcctgtttggggtctatagcaacaccctgctggtgctcacggccacctcccaccaggagcggcgggcccagccgcccagctacatgcacatcttcctagcgggctgcaccggggggttcctgcaggtgagggggcagtgagtgggcacacacaggtgtcatagggatggtcatctcgatctgtcctctcccaccctgccctggcgacccacagctgtggaggcataggcctcttggacgggaacaagaggcctgtgctatggccttccaggctgcaggcctctgggggagggctgtggggaacagagggggcaaaaggcagagacagctggtgggcagtgccaagagggtgctgggagaagcagcctgggccactcgctccagctgacggggcttgcccccctccagaggggtctgccaccctcagagctgtgggggagcccactccccaaggagacctttgaccctggagaaccaccagcaccccgcagagctgtgagcccagcccctctggccgggtcctgatgaggtcctgacactcccctggccctgcctggctctacactttgcctgcagtgcttgggtgcccatgacctgggagcctcacctgaggcccagcccagcagggcattaaccattcaggcactgccgtcatctgggctttgggctttagaggggtggatggagggaagagggaccagctgccgccagtgggaaccggtgctgaatgggtcctgtgagcataagcagggagagggtgcgcccggcacccactgacaccccagccgcaagccagggtcgccctctcctgggcagctgcccccagttccttgtcacacttcatggggcagagagcaaggacaaaggacaaagtcaggctgctccttcaaatgaattaatgattaatgagacccccggaggccccggcttttcttctgccccttcttgtgcgaggtgccacctataggtttcctgagccccgcgagccacatcccacaaacacaaggaagagaaccgaagccctaagctaagtggccaggcccggcttctaagtcaccctgcccccccagctctttggaaagcagaagtggggactgtgagggccgctgatggagcctgggtttacagtgaaacctgtggctttagtttaacagagtcttaaaggaaaaatgtgttttagtgtggagtgggaagaagaggcagggactgacagcctctgacgggcacagacgttgccctggtcttcgccgaagctgaccttctgaaatggcatctgacactccaccacccctgtgggggtgtctgtcacctggtgtcagcctagccctgtcctcagcccccaggagctcagggctcagaacacctcctgaagccctgagctcagccctgccagcacgctctagagggtggcacaaggccccatctcccaagggatggtacctaacctacgacccttactcctgggaccaaagtaaacaagcgaagacttggcctgccacaccctaagtaccaccacccaccaccagaggcgaccgccagcccccgtcgccatcagccatctccagggctgaggaactgagcccatgtacctgtcacaaaacaaacaagcaaaaaacagataaatccctcagagacaggctagccttgacatggaccccgattctcacctggactccaaaagctatcttgacctactggcatctctgacccaaatcttaattgcccccatcgccctctacatccccccagcactgaccctcaccaggactccagccccaattccatcccaaatctgtgtagcatctgcttctgccgattctaagagccctagcacctgccaagtccccccattacccaccttcccacactcagaagcctctttggtgggatgctaatgggaaggagtcttgcctctctggaggcaggaggggctggccttgtgcccctccgggcctctgagaggtgggcgcaggagaacagcactcacgaggggacctccttcaccctgggaaagggtggtttctttgctatttcacagtcacaggctgaatccttcacttggccctgcccaccgtacaggtatgctcactgccggctttagggaggccagaaaccaacctgctcctgcaaaaagaatccaggcttgttctgagtgcctgctgtaggccaggcaagttggtcactgttgcatgaggggcagtgcctctcactcttgggcctgatgccaagggaggtggcctgtcccggtcgcatgcagacatcctggccatcccagccacacatgcacgtgagaggctgggtgccggcagggttcctgagggactggaagatgtggccccctgcctgcctccttcctcttgtgaatataaggggccagttcccagcccaaagccccacccggggccctcatgtttcatcaccaacaggcctactgtctggctccttttgacctcatcaaagtccggctacaaaaccagacagagccaagggcccagccagggagccccccaccccggtaccaggggcccgtgcactgtgcagcctccatcttccgggaggaggggccccgggggctgttccgaggagcctgggccctgacgctgagggacacccccacggtggggatctacttcatcacctatgaagggctctgtcgccagtacacaccagaaggccagaatcccagctcagccacggtgctggtggcagggggctttgcaggcattgcttcctgggtggcagccacgcccttagacgtgatcaagtcccggatgcagatggatggactgagacgcagagtgtaccaggggatgctggactgcatggtgagcagcatccggcaggaaggactgggagtcttcttccggggggtcaccatcaacagtgcccgcgcctttcccgtcaatgctgtcaccttcctcagctacgaatatctcctccgctggtggggatgagccctgcggcaatgccagcagctccccatcaggcccacggcctggaggccagtttgagattggaggccaggttgaaagcttgcaaatcagtgcaagaggctcagcccttcctaaccaaggtgcctcccacccgcgcagatctgggctgggcagacacctgtgggagccggaagccagggggcctgtgcagcctccctgtgtagctggccttgactcctttgcctcccacatctgtgaaacagggagcatgaggcacaagtgagctggcaagtggtgctggtgacatcccagctcctgtcctgtgccttcacctcttttttttttttttttttttttgggatggagtctttctctgtcacccaggctggagtgcagtggcgtgatctcggctcactgcaacctccgcctttccaccttccgggttcaagcaactctcctgcctcagcctcccaagtagctgggactataggcgcccgccaccacacccggctaaatttttgtatttttagtagagacggggtttcaccatgtcggccaggatggtcttgatctcctgactttgtgatccgcccgcgtcggcctcccaaagtgctgagattaacaggcgtgagccaccacccccagctttcctctgtgatcccttctgatcggaccatctctgagcccatccagcaccaccgcagcgccagggattccaggctggacattgcagcgatggtacagcaggtgtcagaacaccactgggcagcccgtggctggaaggaagcaaacaggacgcatgaggaggaggaggtgggctcctataaacagtgcaggaagtaggcaggaggacaggtcagtgtggtcctctgttgtttgctatttctcatcaaattaccagttagcgggaattcccatttgggtgcccctctgtctgagagagagctgttctccttttccctttgcctattaaacctctgctcctaaactcaaaacaacaacaacaaaacagcaagggagtaaaatgaaaaaaatctattttttttggctttagttaaatgggctcccattctccctctctggttctatctagaggagtctcctaaagagcctggagtgcccgtcctctaaactccacctttacagccagagagagtggccagactcaggtgggaccagggagttccaggcccaagttccttccaccaatccatggcaaaggctacccactgggctgggagaacagtcctggagtgagtttagggtttagtatggtgtgattagtgagcaaataactcactcctgcacagtggccccaggaggagatgccactattggaggggagggcagaaagacaaagatggggcaggaaggggccggagagattctaaaaatctagatgttggctaggcatggtggctctcatctgtaatcctagcactttgggatgccaaggtgggcggatcacctggagtcaggagttcgagaccagcctggccgatatggtgaaaccccgtctctactaaaaacacaaagattagccgggcgtggtggcacatgcctgtagtcccagctactggggaggctgaggcaggagaatctcttgaacccaggtggtggaggttgaagtgagctgagattgccccactgcactccagactgggtgacagagagagactctatctcaaaaaacacaaaatttagccgggcttcgtggctcatgcctgtgatctcagcactttgggaggccaaggtgggcagatcacgaggtcaggagatcgagaccatcctggctaacacggtgaaacgccgtctctactaaaaatacaaagagttggccgggcatggtggcacgcacctgtggtcacagttacttgggaggctgaggcaggagaatcacccgaaccagagaggcggaggttgcggtgagccgaaatcgcgccattgcactccaggctggatgacagagcgagacttcgtctcaaaaaaaagaaaacaaaactagatgtttttaatcagcagggtctcataaggcatgcgaaattgcttaaggatttaacagatggtatctcaggttgctgttatttttgagaactcttttcgacagaagaaatccctaagaaccaggagatagtctgtgaacctgctttgaggttacaaaggaggtggtgtctgtcagtcacttgcaaagagctgataacttgagcaaacatgttaaataaagtcccattggactcct

SEQ ID NO: 651 - DNA, 548 bp, HOMO SAPIENS
cggcgctgcggcagtccagatcaaaaatggcggtagttggtgtgtcctcggtttctcggctgctgggtcggtcccgcccacagctggggcggcctatgtcgagtggcgcccatggcgaagagggctcagctcgcatgtggaagactctcaccttcttcgtcgcgctccccggggtggcagtcagcatgctgaatgtgtacctgaagtcgcaccacggagagcacgagagacccgagttcatcgcctacccccatctccgcatcaggaccaagccgtttccctggggagatggtaaccatactctattccataaccctcatgtgaatccacttccaactggctacgaagatgaataaagagaatctggaccactacccgggcaccagggaccacagcactggtttggaccgttactctgcacatggaccagaaaaagtatatgggaccttaagctaaccttctttacttgtatcaaatgatgactggtatactggtctcccatccctttgcttgtggcaggagatggcttaaataaataacttaaactt

SEQ ID NO: 652 - DNA, 1142 bp, HOMO SAPIENS
cttttccaagcggctgccgaagatggcggaggtgcaggtcctggtgcttgatggtcgaggccatctcctgggccgcctggcggccatcgtggctaaacaggtactgctgggccggaaggtggtggtcgtacgctgtgaaggcatcaacatttctggcaatttctacagaaacaagttgaagtacctggctttcctccgcaagcggatgaacaccaacccttcccgaggcccctaccacttccgggcccccagccgcatcttctggcggaccgtgcgaggtatgctgccccacaaaaccaagcgaggccaggccgctctggaccgtctcaaggtgtttgacggcatcccaccgccctacgacaagaaaaagcggatggtggttcctgctgccctcaaggtcgtgcgtctgaagcctacaagaaagtttgcctatctggggcgcctggctcacgaggttggctggaagtaccaggcagtgacagccaccctggaggagaagaggaaagagaaagccaagatccactaccggaagaagaaacagctcatgaggctacggaaacaggccgagaagaacgtggagaagaaaattgacaaatacacagaggtcctcaagacccacggactcctggtctgagcccaataaagactgttaattcctcatgcgttgcctgcccttcctccattgttgccctggaatgtacgggacccaggggcagcagcagtccaggtgccacaggcagccctgggacataggaagctgggagcaaggaaagggtcttagtcactgcctcccgaagttgcttgaaagcactcggagaattgtgcaggtgtcatttatctatgaccaataggaagagcaaccagttactatgagtgaaagggagccagaagactgattggagggccctatcttgtgagtggggcatctgttggactttccacctggtcatatactctgcagctgttagaatgtgcaagcacttggggacagcatgagcttgctgttgtacacagggtatttctagaagcagaaatagactgggaagatgcacaaccaaggggttacaggcatcgcccatgctcctcacctgtattttgtaatcagaaataaattgcttttaaagaaaaaaaaaaaaaaaaaa

SEQ ID NO: 653 - DNA, 1683 bp, HOMO SAPIENS
ggtctgggggcgttctctcgagtccgggccgcaagtcccagacgctgcccatggaggcgtccagcgagccgccgctggatgctaagtccgatgtcaccaaccagcttgtagattttcagtggaaactgggtatggctgtgagctcagacacttgcagatctcttaagtatccttacgttgcagtgatgctaaaagtggcagatcattcaggccaagtaaagaccaagtgctttgaaatgacgattccacagtttcagaatttctacagacagttcaaggaaattgctgcagttattgaaacggtgtgaagacggattctttggttgataaattgctatcattctaaagtcatggacttcactttcggcaacaaaactaaataaggatggaacatttattgaatgaaaaatgcacttttgtttttccatttttttaaataataaaaatcagacaaacaggaactgggtagtggtgatgaatgcaaaactttgtgaatgtgctttataaaagtgataattagacactttagaggatatacttggtgataatgtgaatgatgtaatcagactaacagttgaatcattgctgttggaggcagcacaaatttatgtgttacaacagtagtttaaaaacttgtactggatggaacccattttataaacagtcttatttggagtcatgtatataaaaatatatataaattagaaaagtagtatttgattaggataactttacaaattcaatagtatagccatcacttattataatggcaatcagaagagtgaggcttcttttttcaaacttttgtaatcagattaagattgaccattgctcctttacacagtattagtctagcattcaattatttctgttattaatggttgtagaaagttcaaatacatacgcagagttggaaagacgagttttagtctgagttctgtacgacggagttaacccgttagcacaagttattgcattagatgatctctgttgaatttaaatacataaacctgttgttaaacgcttttatactataaagccaccacattgtatggcatttgtttagaagtaagcaaatagaccaccggaatagaatagatggcctagaaatagatcaagacattctggtccgccatattagaaatttaaaccctcttcacaccctgtctgcatttctgcaggtctgtgtgagtccactttcttttttgttccctgctaggtagcacacagctgtgaggagcccaggactgctgcctgccgcagcccacctgtgcgctcagattcctaccagcttgatgagttagctgatgggccatttgtgcataccaactacccacagacatttctattacccaccctctggatgccagtgcattaatgattctagaattaggagaaaccaaagatcccttctctctccctcccacaaccagtgtcgtcgtgttcctagaaataagagtagaaacccctctatctgggttaaaacagcaaacctgccttctgtaactgtgcatgaggttcctctgtctcccacttacttcggattaacaccttcctctttccccttccctgtttgcagggtagcatttctaggtttaaggcaatatgcaaaaagacccaaagttaggccctggctcaaacactgtgggtagcagatttgaaataaatttaaattgcatgttt

SEQ ID NO: 654 - DNA, 529 bp, HOMO SAPIENS
cgctctcctttcgttgcctgatcgccgccatcatgggtcgcatgcatgctcccgggaagggcctgtcccagtcggctttaccctatcgacgcagcgtccccacttggttgaagttgacatctgacgacgtgaaggagcagatttacaaactggccaagaagggccttactccttcacagatcggtgtaatcctgagagattcacatggtgttgcacaagtacgttttgtgacaggcaataaaattttaagaattcttaagtctaagggacttgctcctgatcttcctgaagatctctaccatttaattaagaaagcagttgctgttcgaaagcatcttgagaggaacagaaaggataaggatgctaaattccgtctgattctaatagagagccggattcaccgtttggctcgatattataagaccaagcgagtcctccctcccaattggaaatatgaatcatctacagcctctgccctggtcgcataaatttgtctgtgtactcaagcaataaaatgattgtttaacta

SEQ ID NO: 655 - DNA, 1030 bp, HOMO SAPIENS
gacaaggagatttccaggagccatgcttccctctaatatcacctcaacacatccagctgtctttttgttggtaggaattcctggtttggaacacctgcatgcctggatctccatccccttctgctttgcttatactctggccctgctaggcaactgtacccttctcttcattatccaggctgatgcagccctccatgaacccatgtacctctttctggccatgttggcaaccattgacttggttctttcttctacaacgctgcccaaaatgcttgccatattctggttcagggatcaggagatcaacttctttgcctgtctggtccagatgttcttccttcactccttctccatcatggagtcagcagtgctgctggccatggcctttgaccgctatgtggccatctgcaagccattgcactacacgacggtcctgactgggtccctcatcaccaagattggcatggctgctgtggcccgggctgtgacactaatgactccactccccttcctgctcagacgcttccactactgccgaggcccagtgattgcccattgctactgtgaacacatggctgtggtaaggctggcgtgtggggacactagcttcaacaatatctatggcattgctgtggccatgtttattgtggtgttggacctgctctttgttatcctgtcttatgtcttcatccttcaggcagttctccagcttgcctctcaggaggcccgctacaaggcatttgggacatgtgtgtctcacataggtgccatcctgtccacctacactccagtagtcatctcttcagtcatgcaccgtgtagcccgccatgctgcccctcgtgtccacatactccttgctattttctatctccttttcccacccatggtcaatcctatcatatatggagtcaagaccaagcagattcgtgagtatgtgctcagtctattccagagaaagaacatgtagatggatagttctctttttttatcccacttgccaagtaatgagaatgctggattggggttgagg

SEQ ID NO: 656 - DNA, 4003 bp, HOMO SAPIENS
actcagacacgcagctggaccggacagggcggcttccgggtttggcgcggcctttgtctcttgctgcagccggagctccggtctcgtcttcactgctgtttgtcctctgctcctagaggcccagactctgtggctctgtgacctgcaggtattgggagatccacagctaagactccaggaccctctggaagcctagaaatgggaccattgacatttatggatgtggccatagaattctctctggaggagtggcagtgcctggacacagcacagcagaatttatataggaatgtcatgttagagaattatagaaacctggtattcctgggtattgctgtgtctaatttagacctgatcacctgtctggagcaaggaaaagagccctggaatatgaagagacacgagatggcagccaaacccccagctatgtgttctcattttgccaaagaccttaggccagagcaatatataaaaaattctttccaacaagtgatactgagaagatatggaaaatgtggatatcagaaaggctgtaaaagtgtggatgagcataagttgcacaaaggaggtcacaagggacttaaccggtgtgtgacaactacccagagcaaaatagttcagtgtgacaaatacgtgaaagtctttcataaatattcaaatgcaaagagacataagataagacatactggaaaaaatcctttcaaatgtaaagaatgtggcaaatcattttgcatgctttcacaactaactcaacatgagataattcatactggagaaaaaccctacaaatgtgaagaatgtggcaaagcttttaaaaagtcctcaaaccttacgaatcataagataattcatactggagagaaaccctacaaatgtgaagaatgtggaaaagcttttaaccagtcctcaactcttactagacataagataattcatactggagagaaactctacaaatgtgaagaatgtggcaaagcttttaaccggtcctcaaaccttactaaacataagatagttcatactggagagaaaccctacaaatgtgaagaatgtggcaaagcttttaaacagtcctcaaaccttactaatcacaagaaaattcatactggagagaaaccctacaaatgtggagaatgtggcaaagcctttaccctatcttcacaccttactacacataagaggattcatactggtgagaaaccctacaaatgtgaagaatgtggcaaagcttttagtgtattttcaacccttactaaacataagataattcatactgaagagaaaccctacaaatgtgaagaatgtggcaaagcttttaaccggtcctcacaccttactaatcataaggtaattcatactggagagaaaccctacaaatgtgaagaatgtggtaaagcctttaccaagtcctcaactcttacttatcataaggtaattcatactggaaagaaaccctacaaatgtgaagaatgtggtaaagcctttagtatattctcaatccttactaaacataaagtaattcatactgaagacaaaccctacaaatgtgaagaatgtggcaaaacttttaactactcctcaaattttactaatcataaaaaaattcatactggagagaaaccctataagtgtgaagaatgtggcaaaagctttattctgtcctctcatcttactacacataagataattcatactggagagaaaccctacaaatgtaaagaatgtggcaaagcttttaaccagtcctcaacccttatgaaacataagataattcatactggagagaaaccctacaaatgtgaagaatgtggcaaagcctttaaccagtccccaaaccttactaaacataagagaattcataccaaagagaaaccctacaaatgtaaataatgtgtcaaatcctttagtgtattttcaacttttattaaaacacaagataattcatactggagagaaatcctacaaatgtgataaatgtggcaaagcctttaactggctcttaatccttatgaaacaaaagataattcatactagagagaaaccctacaaatgtaaagaatgtggcaaagcatttaactggtccctaaatcttactaaacataaaaaaacttaaactggagagaaactacaaagctggaagacatcacagtaattctgacaacacctcaaacttttctaaacataaaataaatcatactggtgaggaactttaaaaatgcgaaaaatgtgacaaaatctttaaatgattgtcacacttgattgtaggtaagataattcttactagaaaaactcttacaagtgtgaagaatgtggcaaaatttttaatgaatactcacaccttattgccaggaaagcatttatacttgagaaaaattgtaccaatataaagactgtgaaaaagccattaatgtctgctcacatcttactcaacatcagagagtacttaaaaaaagtattataaatttaattactgtcaaaaagtatttcagaaaatataagcttttaaagtatttattttgaagacaaacattacaaataaaagaggattgtaatacctttatttgtatcacagatcttattgtacacattttgtactagagaaaaccctgaagcagttacttaaactttgttcaacatcagggaattcagattggagaaaaaccctgcaaatgtaataaatttgaaaaaaaagttttccaaaactacaacttagacaacaccagagggttcatactgagatatatttttgcagatgcagtatatatttaaaacatttaatccaaaataagtctatgtaaatatcagagaattcacagtggaaatatctaaggtagggccgggcatggtggctcacgcctgtaatgccagcactttgggaggctgaggtgggcagatcatgaggtcaacagattgagaccatcctggtcaacatggtaaaaccctgtctctactaaaaatacaaaaattagctgggcgtggcggcacgtgcctgtagtctcagctacttgggacgctgaggcaggaaaatccgttgaacccaggaggcagaggttgtagtgagccgagattgcaccactgcactccagccgggtgacagagtgagactccatctcaaaaacaaacaaactaaggtatggatgcttcagacattacactatatcaaagtgctgactgttaaaaatgatcccaaactaacggtagataaatttatttgtacataactttaaaaggagtagaagattttttggaagtttgtaattacattcaaagtatactttttttgtttgtttgttttccttgagacagagtctctctctgtcgtccaggctggagtgcagtggcacaatctcagctcgctgcaacctctgcctcctgggttcaagcaattctcctgcctcagcctactgagtagctgagattacaggtgcacaccaccacgtccggctgacttttgtatttttagtagggacggggtttcaccatattggtcagggtagtcttgaactcctgacctcatgctctgcccagcttggcttcccaaagtgctgtgattacaggcttaagccacagcgcccggcccaaagtgttcttttttccttgaaaagaagtacagattttttaaaaagctaatattgctgtgattcaactctctagttacttgatgctatttcttcatttctattgtattcacatgtgaaagcatgtgatcagttgtcacggcatcaaagataggagagtttctttttttttaggtgggcattatttatgaccttttctttggaagagtaaggacattaaaatgtaacatgcatgatgaaaatctaagtggagatggtatttgtggttaattatgatattgagtggtgcatgaggtaggtgtttagagtaatattcttttgcattatagtaagaacatttaagttttgttaaaattaaaaaattagtacgttattttactatttgtacttttatgtaataaaatgcagtacatttttaaattttc

SEQ ID NO: 657 - DNA, 4053 bp, HOMO SAPIENS
ataggtgcattgtgggaagcactttgctgtccacagccaggccgcttgtgatgaaactgtaacttacaagaaaagggctgggttttgaaaataacacaggctctaaaaaccctaagaagcggtgcaacttttggcaggaatcggggttagcgggacctcaagggctcactgcggctaagtgaacgctgactggtcctccagcgtgagctagaacagacgtctctatggtcaagtaaacagagcgtgtgctgtcttccccatgtggtggggttgcgcatgatcagtagctgcaccactagaaagatggcggagcaagagcaaagaaaaatccctttggttccagaaaatctcctgaaaaagaggaaggcttatcaagccctcaaagccacccaggcaaagcaggcacttttggcaaagaaggagcagaagaaaggaaaagggctcaggtttaagcgactggaatcattcctacatgattcctggcggcagaaacgtgacaaggtgcgtctcagacgactagaagtgaaacctcatgccttggaattgccagataaacattccttggcctttgttgtacgcatcgaaaggattgacggcgtgagtttactggtgcagagaaccattgcaagacttcgcctaaagaaaatttttagtggtgtctttgtaaaagtcaccccccagaatctaaaaatgctgcgtatagtggaaccttatgtgacctggggatttccaaatctgaagtctgtccgagaactcattttgaaacgtggacaagccaaggtcaagaataagaccatccctctgacagacaatacagtgattgaggagcacctggggaagtttggcgtcatttgcttggaagacctcattcatgaaattgccttcccagggaagcatttccaggagatctcatggttcttgtgccctttccacctctcagtggcccgtcatgctaccaaaaatagagtgggcttcctcaaggagatgggcacacctggctatcggggtgaacgcatcaatcagctcatccgtcagctgaactagacccaggtgccaaactgcggtaaattttttatcagtgaagtggaagcatgtgttttgttttggaaatttttatcaagtatcttcagagaagattatttcctgctttatcttcagaaactggaaagggtcaaagaaaagacagtagctggccggtcgtggtggctcatgcctgtaatcccaacacttagggaggctgaggtgggcagatcacctgaggttgggagttcgagaccagcctgaccaacatggagaaatgccatctctactaaaaatacaaaaattagccgggcatggtggcacgtgcctgtaatcccagctactcaggaggctgaggcaggagaatcgcttgaacctgggaggtggaagttgcagtgagctgagatcacgccattgcactccagcctgggcaacaagcgaaactctgtctcaaaaaaaaagaaaagacagtagcatatgttcatgtcaagcacctctcatcacagtcgagttccaaggaaaaattcccagcgttttctgcattgggtgctgtgtcatctgaaatcggcacattccatggaggaaggagtcctgctttgttgcatgtatcctagggtttaatgttggtaaatgagtcactctagcatttgtagaaggctccctgagactcctgcagcagtcgaccaagcccaaggacataattgaatctggagagtcctggggccttgttttgaaaaagacttgaaatacacataggaagaaaggcataaaaataaatgttcacttgtctctgctgtgagtatgtgttccaacttttcagtgatggctttgagaattctcaaacttgactggctctaagtgtatctggtggcttttgtatcgtaacctgaaactggcttagtactttttcctaaaagctcaggatttgagaatgaggaccccttcgccaggaaaacatgtatacactcaaaattttgcttgcagttctagggtgtttagacccttctcagatacctgtgcatcttatgggttttgtttttctctttgagacagtctcaccctgttgcccaggctggagcgcagtggcatgatctcagctcattgcagcctccacctcctgggttcaagtgattctgcctcagccccttgatcagctgggattacatgcatgtaccaccacacccagctaattcttgtatttttagtagagatggagacagagtttcaccatgtaggccaggctagtctcaaactcctgacctcaagtgatccacaagcctgggcctcccaaagtgctgggattacaggcatgagcaactgcgcccagctcttgtgtaccttatgtgaggaagtcctgctcaatcaggatcggtcacgcaggccctgatcttgctactctggttccatgtcctatggaagaccaaagtttaccaagatagatttttcccttcatagtggcagatagtgttaacccctgcaccatctgtaactcagaaatccccaccatttcttcccctgggcttcagaatagaattgcctggtttctctgatgatcagcatggttccttaaaacccaaatcagcaaggaatgaacaattttgtttggcatggatgaaattagcactgtttggctcgttaggccccaggcaggcaggcaccttaattttttccttgcatattctagtcttcagaagcattgccttttgtcctactggtagtgacatagaccaataacagggcatctggggattttaatcctgaaaacagtgagtctgatactgcttgtgtttttcatcagtgtccaccccaagtgggtcttcctgctattctcttcacttagttgcccctcacttgccatctgagcaattggcaaggatgtgccaggcctaggttaaacttggaaacatgcttgaccattctattccctggtcctttaagatcagtttggctgcaattttggctccttggaccctcaagcatagctggtaaatcaagttagagatgtaactgccttaaaacatgccagcttaggctgggcacggtggctcacacctgtaatctcaacacttcaggaggctgaggcaggcagatcacttgaggtcaggagttcgagaccagcctgaccaacatggagaaattctgtccctactgaaaatacaaaattagccggatgtggtggtgcatgcctgtaatcccagctacttgggaggctgaggcaagagaattgcttgaacccagggaggcagaggttgcagtgagccgagatcacaccattgcactccaccttgggcaacaaaagcaaaactctgtctcaaaaaaaaaaaaaaaaaaagtgccagcgtatgaggtaattagattggttctctccagaggtaacctgccaagaagagatgctatagatgttactcctatactgtaaaacattgtgaaatcagattactttaaaatgatgtattacaaagttatgcaaaaaagcagttgtgactatggaagcccaaggcttatatcccagctctgtcttacactaaatatgggtacagtgtttccactctgtccataaaatgggagctaatattctccaacctgtgtgcctgacatgatggttaaagggattaaacaaaacaatagtttgtaatttattctgtcagagcaaactgctggtaaataaaagggactaagttgacgaaaaataaattttaaaaaacctaataaaacaagtttgtaatttataattgtatacaaataaaagatgttacaaaaattgcgcacttatatgtatgtaccatgacataactaattcgttgaacaagttgtgagacaatcctttctgagaaaaggtagacctgttacatcgtctgtgggttagggtcatgtcagcacgtaccaggtacattctagcttttgtagagaaagtaaaatctagtgttgagtatgtaggcactgagccaggtggcctgcttaacataaaaggactgatttcagggtggctgtgggagcctttctaatgctctaattctctagccccttgcctga

SEQ ID NO: 658 - DNA, 4451 bp, HOMO SAPIENS
gctccgcccccgcgccgccggccctagtctgcctgttttcgactcgcgctccggctgctgtcacttggctctctggctggagcttgaggacgcaaggagggtttgtcactggcagactcgagactgtaggcactgccatggcccctgtgctcagtaaggactcggcggacatcgagagtatcctggctttaaatcctcgaacacaaactcatgcaactctgtgttccacttcggccaagaaattagacaagaaacattggaaaagaaatcctgataagaactgctttaattgtgagaagctggagaataattttgatgacatcaagcacacgactcttggtgagcgaggagctctccgagaagcaatgagatgcctgaaatgtgcagatgccccgtgtcagaagagctgtccaactaatcttgatattaaatcattcatcacaagtattgcaaacaagaactattatggagctgctaagatgatattttctgacaacccacttggtctgacttgtggaatggtatgtccaacctctgatctttgtgtaggtggatgcaatttatatgccactgaagagggacccattaatattggtggattgcagcaatttgctactgaggtattcaaagcaatgagtatcccacagatcagaaatccttcgctgcctcccccagaaaaaatgtctgaagcctattctgcaaagattgctctttttggtgctgggcctgcaagtataagttgtgcttcctttttggctcgattggggtactctgacatcactatatttgaaaaacaagaatatgttggtggtttaagtacttctgaaattcctcagttccggctgccgtatgatgtagtgaattttgagattgagctaatgaaggaccttggtgtaaagataatttgcggtaaaagcctttcagtgaatgaaatgactcttagcactttgaaagaaaaaggctacaaagctgctttcattggaataggtttgccagaacccaataaagatgccatcttccaaggcctgacgcaggaccaggggttttatacatccaaagactttttgccacttgtagccaaaggcagtaaagcaggaatgtgcgcctgtcactctccattgccatcgatacggggagtcgtgattgtacttggagctggagacactgcctttgactgtgcaacatctgctctacgttgtggagctcgccgtgtgttcatcgtcttcagaaaaggctttgttaatataagagctgtccctgaggagatggaacttgctaaggaagaaaagtgtgaatttctgccattcctgtccccacggaaggttatagtaaaaggtgggagaattgttgctatgcagtttgttcggacagagcaagatgaaactggaaaatggaatgaagatgaagatcagatggtccatctgaaagccgatgtggtcatcagtgcctttggttcagttctgagtgatcctaaagtaaaagaagccttgagccctataaaatttaacagatggggtctcccagaagtagatccagaaactatgcaaactagtgaagcatgggtatttgcaggtggtgatgtcgttggtttggctaacactacagtggaatcggtgaatgatggaaagcaagcttcttggtacattcacaaatacgtacagtcacaatatggagcttccgtttctgccaagcctgaactacccctcttttacactcctattgatctggtggacattagtgtagaaatggccggattgaagtttataaatccttttggtcttgctagcgcaactccagccaccagcacatcaatgattcgaagagcttttgaagctggatggggttttgccctcaccaaaactttctctcttgataaggacattgtgacaaatgtttcccccagaatcatccggggaaccacctctggccccatgtatggccctggacaaagctcctttctgaatattgagctcatcagtgagaaaacggctgcatattggtgtcaaagtgtcactgaactaaaggctgactttccagacaacattgtgattgctagcattatgtgcagttacaataaaaatgactggacggaacttgccaagaagtctgaggattctggagcagatgccctggagttaaatttatcatgtccacatggcatgggagaaagaggaatgggcctggcctgtgggcaggatccagagctggtgcggaacatctgccgctgggttaggcaagctgttcagattcctttttttgccaagctgaccccaaatgtcactgatattgtgagcatcgcaagagctgcaaaggaaggtggtgccaatggcgttacagccaccaacactgtctcaggtctgatgggattaaaatctgatggcacaccttggccagcagtggggattgcaaagcgaactacatatggaggagtgtctgggacagcaatcagacctattgctttgagagctgtgacctccattgctcgtgctctgcctggatttcccattttggctactggtggaattgactctgctgaaagtggtcttcagtttctccatagtggtgcttccgtcctccaggtatgcagtgccattcagaatcaggatttcactgtgatcgaagactactgcactggcctcaaagccctgctttatctgaaaagcattgaagaactacaagactgggatggacagagtccagctactgtgagtcaccagaaagggaaaccagttccacgtatagctgaactcatggacaagaaactgccaagttttggaccttatctggaacagcgcaagaaaatcatagcagaaaacaagattagactgaaagaacaaaatgtagctttttcaccacttaagagaaactgttttatccccaaaaggcctattcctaccatcaaggatgtaataggaaaagcactgcagtaccttggaacatttggtgaattgagcaacgtagagcaagttgtggctatgattgatgaagaaatgtgtatcaactgtggtaaatgctacatgacctgtaatgattctggctaccaggctatacagtttgatccagaaacccacctgcccaccataaccgacacttgtacaggctgtactctgtgtctcagtgtttgccctattgtcgactgcatcaaaatggtttccaggacaacaccttatgaaccaaagagaggcgtacccttatctgtgaatccggtgtgttaaggtgatttgtgaaacagttgctgtgaactttcatgtcacctacatatgctgatcttttaaaatcatgatccttgtgttcagctctttccaaattaaaacaaatatacattttctaaataaaaatatgtaatttcaaaatacatttgtaagtgtaaaaaatgtctcatgtcaatgaccattcaattagtggtcataaaatagaataattcttttctgaggatagtagttaaataactgtgtggcagttaattggatgttcactgccagttgtcttatgtgaaaaattaacttttttgtggcaattagtgtgacagtttccaaattgccctatgctgtgctccatatttgatttctaattgtaagtgaaattaagcattttgaaacaaagtactctttaacatacaagaaaatgtatccaaggaaacattttatcattaaaaattacctttaattttaatgctgtttctaagaaaatgtagttagctccataaagtacaaatgaagaaagtcaaaaaattatttgctatggcaggataagaaagcctaaaattgagtttgtagaactttattaagtaaaatccccttcgctgaaattgcttatttttggtgttggatagaggatagggagaatatttactaactaaataccattcactactcatgcgtgagatgggtgtacaaactcatcctcttttaatggcatttctctttaaactatgttcctaacaaaatgagatgataggatagatcctggttaccactcttttgctgtgcacatacgggctctgactggttttaatagtcaccttcatgattatagcaactaatgtttgaacaaagctcaaagtatgcaatgcttcattattcaagaatgaaaaatataatgttgataatatatattaagtgtgccaaatcagtttgactactctctgttttagtgtttatgtttaaaagaaatatattttttgttattattagataatatttttgtatttctctattttcataatcagtaaatagtgtcatataaactcatttatctcctcttcatggcatcttcaatatgaatctataagtagtaaatcagaaagtaacaatctatggcttatttctatgacaaattcaagagctagaaaaataaaatgtttcattatgcacttttagaaatgcatatttgccacaaaacctgtattactgaataatatcaaataaaatatcataaagcattttaaaaaa

SEQ ID NO: 659 - DNA, 2986 bp, HOMO SAPIENS
gtagcttctatcctgggggctgagcgactgcgggccagctcttcccctactccctctcggctccttgtggcccaaaggcctaaccggggtccggcggtctggcctagggatcttccccgttgcccctttggggcgggatggctgcggaagaagaagacgaggtggagtgggtagtggagagcatcgcggggttcctgcgaggcccagactggtccatccccatcttggactttgtggaacagaaatgtgaagtttttgatgatgaagaagaaagcaaattgacctatacagagattcatcaggaatacaaagaactagttgaaaagctgttagaaggttacctcaaagaaattggaattaatgaagatcaatttcaagaagcatgcacttctcctcttgcaaagacccatacatcacaggccattttgcaacctgtgttggcagcagaagattttactatctttaaagcaatgatggtccagaaaaacattgaaatgcagctgcaagccattcgaataattcaagagagaaatggtgtattacctgactgcttaaccgatggctctgatgtggtcagtgaccttgaacacgaagagatgaaaatcctgagggaagttcttagaaaatcaaaagaggaatatgaccaggaagaagaaaggaagaggaaaaaacagttatcagaggctaaaacagaagagcccacagtgcattccagtgaagctgcaataatgaataattcccaaggggatggtgaacattttgcacacccaccctcagaagttaaaatgcattttgctaatcagtcaatagaacctttgggaagaaaagtggaaaggtctgaaacttcctccctcccacaaaaaggcctgaagattcctggcttagagcatgcgagcattgaaggaccaatagcaaacttatcagtacttggaacagaagaacttcggcaacgagaacactatctcaagcagaagagagataagttgatgtccatgagaaaggatatgaggactaaacagatacaaaatatggagcagaaaggaaaacccactggggaggtagaggaaatgacagagaaaccagaaatgacagcagaggagaagcaaacattactaaagaggagattgcttgcagagaaactcaaagaagaagttattaataagtaataattaagaacaatttaacaaaatggaagttcaaattgtcttaaaaataaattatttagtccttacactgaaaaaaaaaaaaaaaaaactcgagactagttctctctctccataaatattatactagcatttaccatctcacttctaggaatactagtatatcgctcacacctcatgtcctccctactatgcctagaaggaataatactatcgctgttcattatagctactctcataaccctcaacacccactccctcttagccaatattgtgcctattgccatactagtctttgccgcctgcgaagcagcggtgggcctagccctactagtctcaatctccaacacatatggcctagactacgtacataacctaaacctactccaatgctaaaactaatcgtcccaacaattatattactaccactgacatgactttccaaaaaaacacataatttgaatcaacacaaccacccacagcctaattattagcatcatccctctactattttttaaccaaatcaacaacaacctatttagctgttccccaaccttttcctccgaccccctaacaacccccctcctaatactaactacctgactcctacccctcacaatcatggcaagccaacgccacttatccagtgaaccactatcacgaaaaaaactctacctctctatactaatctccctacaaatctccttaattataacattcacagccacagaactaatcatattttatatcttcttcgaaaccacacttatccccaccttggctatcatcacccgatgaggcaaccagccagaacgcctgaacgcaggcacatacttcctattctacaccctagtaggctcccttcccctactcatcgcactaatttacactcacaacaccctaggctcactaaacattctactactcaccctcactgcccaagaactatcaaactcctgagccaacaacttaatatgactagcttacacaatagcttttatagtaaagatacctctttacggactccacttatgactccctaaagcccatgtcgaagcccccatcgctgggtcaatagtacttgccgcagtactcttgaagctaggcggctatggtataatacgcctcacactcattctcaaccccctgacaaaacacatagcctaccccttccttgtactatccctatgaggcataattataacaagctccatctgcctacgacaaacagacctaaaatcgctcattgcatactcttcaatcagccacatagccctcgtagtaacagccattctcatccaaaccccctgaagcttcaccggcgcagtcattctcataatcgcccacggacttacatcctcattactattctgcctagcaaactcaaactacgaacgcactcacagtcgcatcataatcctctctcaaggacttcaaactctactcccactaatagctttttgatgacttctagcaagcctcgctaacctcgccttaccccccactattaacctactgggagaactctctgtgctagtaaccacattctcctgatcaaatatcactctcctacttacaggactcaacatactagtcacagccctatactccctctacatatttaccacaacacaatggggctcactcacccaccacattaacaacataaaaccctcattcacacgagaaaacaccctcatgttcatacacctatcccccattctcctcctatccctcaaccccgacatcattaccgggttttcctcttaaaaaaaaaaaaaaaaaaaaaaaaaaaaaaaaaaaaaaaaaaaaaaaaaaaaaaa

SEQ ID NO: 660 - DNA, 1245 bp, HOMO SAPIENS
gctcctccccgcccggccgggcccagcagcccctaggagcccagcgccgccgccatgtcctccggggctagcgcgagcgccctgcagcgcttggtagagcagctcaagttggaggctggcgtggagaggatcaaggtctctcaggcagctgcagagcttcaacagtactgtatgcagaatgcctgcaaggatgccctgctggtgggtgttccagctggaagtaaccccttccgggagcctagatcctgtgctttactctgaagactctaggagagaagtttgctgaggaatgccttcaagcacaaagtgatgaatgactgccttcaagtctcaagaaaacacttttccctaacttttagagatatttcagccctttcctgtggcctggtcctatagccaaaatcacagatattcatgagtttctacttgagtgagaaaactgggtgaaggaatagaattttaaatagtaataactgcttgttttttttgtgcaagtacttttatacataagataaacaaaaaccttaccaccaaacataccaaaatgcacctctttcataagtgagttactaagatttctatacctggaatatcatgtatgtttcatttactggatgtttacattttaggaaggaaaatagttttgtttatttaaacaactgaatacttataaactgttgttcctggaagttatttattccataaaaaatttgttcttttgtcatgaatttataattcctaaatgaagaccagaaagtacaaattgctgggaggaagaataggctttattaatcaactgatgtcttgatttttctaaatgggaagattgctttatttttaacactaattatgggagcagattcttagcaaacttctttggaaaagttaatgttatgatgtgcattaggctgccccatcgtgtatataaatgaagcagatttgatttttgtattcttacgtttctctgctttgtagttgtggctgtacttaaagaaatacagaatttcatatatttaaaaatgtttaaaatgtgacccacagaacattgtaaatgattaaaaactaacatgaaaatattacaacctaaaagaattcttaacttcacaagtgttttacttcgacgatgtgcctttgatttaatttgggacacttttttagaaggatacattattcgtgtttgcaacggtctttgaagagcttggaaataaaatttctgcttaattaatcatttttctatgacagcaa

SEQ ID NO: 661 - DNA, 1979 bp, HOMO SAPIENS
acacccttggtccctcctgcaagttccgcccctggcctctgcctccttttctcccgccggctctaacccgcgcttggctaaggtccgcgggaacccgtgagccaccgagagagcagagaactcggcgccgccaaacagcccagctcgcgcttcagcgtcccggcgccgtcgcgccactcctccgatggccacagatgtctttaattccaaaaacctggccgttcaggcacaaaagaagatcttgggtaaaatggtgtccaaatccatcgccaccaccttaatagacgacacaagtagtgaggtgctggatgagctctacagagtgaccagggagtacacccaaaacaagaaggaggcagagaagatcatcaagaacctcatcaagacagtcatcaagctggccattctttataggaataatcagtttaatcaagatgagctagcattgatggagaaatttaagaagaaagttcatcagcttgctatgaccgtggtcagtttccatcaggtggattatacctttgaccggaatgtgttatccaggctgttaaatgaatgcagagagatgctgcaccaaatcattcagcgccacctcactgccaagtcacatggacgggttaataatgtgtttgatcatttttcagattgtgaatttttggctgccttgtataatccttttgggaattttaaaccccacttacaaaaactatgtgatggtatcaacaaaatgttggatgaagagaacatatgagcacatgagttaagattgtgactgatcatgatttatttgaagatggagcactgctgatttatgaaggaaaaaagaagaattttctaaagattacacatatttcagaaagactttacccaattcagttgtcagacataatgatttatttgaaggcttgttttatttgaagaaaagcatattgccaaaaattctggttaaaagcttcctaacgggtaacagaccatgggagagatatgtggttgggtaatgcaaatgtagttatacaaagaaaaatacagatgtctccagacctgaggactttttaatagggcagttgttgtgttggtggcacattggatatttctaacatgtacaaagctatgtattttgatttactttcatttcttgctatgtatatgtacttttcttaaaatgccaagaactttctcttgctatcattgctccttttgaaacaattcaattttcatgtctacagctgactgttttgttaagattgagtcatcgacattcaggatttaagtctgaggtagtcaaccctcaggaaaaaaaaaatggcttatctgaaatcagtactgtggaaatgaactatattagctattatgaataatgtccagtataagaatatgcttctggaattgagttctccttttaagtaccaatgatacttaaatttctcagaaatgtaatggtgtgtcattgccttgaaatgcttgcttagggcttcttttatgttatcttaaaaagtgctggtgaattttccattttttacatccatttcacatgtaagagacaaaaaagtctagattggtcttgatattgagataataaaaagtaagtagcattaagaaaggtaacaatcttcattctacagatgaactcattgaaacaatttaggggaatgaggggcaaaaggggagaaatactgctaaagaacatgagcataaaaatgcgtgcgtttcagtgtttaagaaggcttgataaagaatgtcacttttttatttaactgataagatttttgttattttttactttgataagtaaaccaaagaatatttgtatttcaagcagtttgtgtggtgtttctatataattttctgtgtataaataataaagtaggcatttgtttattttgtaaaaaagaaatgaaaatctgctggccagctatgtcctctaggaaatgacagacccaaccaccagcaataaacatttccattgtcaaaaaaaaaaa

SEQ ID NO: 662 - DNA, 1287 bp, HOMO SAPIENS
gcggcagctgcttgggcgcggtgcggtggtgactgagctacgagcctggcggcgggtgtgcgccgagccccggcccggcccggccctcgcgtgcctcccaggctccgcacccctgatgctgcgcgggtgctgagcccgcttcggccgggacgatggtgaagtatttcctgggccagagcgtgctccggagttcctgggaccaagtgttcgccgccttctggcagcggtacccgaatccctatagcaaacatgtcttgacggaagacatagtacaccgggaggtgacccctgaccagaaactgctgtcccggcgactcctgaccaagaccaacaggatgccacgctgggccgagcgactatttcctgccaatgttgctcactcggtgtacgtcctggaggactctattgtggacccacagaatcagaccatgactaccttcacctggaacatcaaccacgcccggctgatggtggtggaggaacgatgtgtttactgtgtgaactctgacaacagtggctggactgaaatccgccgggaagcctgggtctcctctagcttatttggtgtctccagagctgtccaggaatttggtcttgcccggttcaaaagcaacgtgaccaagactatgaagggttttgaatatatcttggctaagctgcaaggcgaggccccttccaaaacacttgttgagacagccaaggaagccaaggagaaggcaaaggagacggcactggcagctacagagaaggccaaggacctcgccagcaaggcggccaccaagaagcagcagcagcagcaacagtttgtgtagccagtctaccaccaccacagcaccccagacagctaggcttagcccctctgccctcccttcattgtactttatcattaaaaatcaacttccagccctgtctgctgtctacgtggtgggttgtggggatgcagtttggcatctgcagtacaccaagcacatgattcatgtctgagccaggtctgcttattctcccattgggcagctgaggaccgaggcacagaggtgcggtgacttgcccggggctccaggtagcctgcaggttaactggcggtaagtgctagactgtaagcccgacaagggcagggcttttggttttgttctctgatgtgtctcagtatctagcacataatagacactcaataaatacttgttgaattcaaaaaaaaaaaaaaaaaaaaaaaaaaaaaaaaaaaaaaaaaaaaaaaaaaaaaaaaaaaaaaaaaaaaaaaaaaaaaaaaaaaaaaaaaaaaaaaaa

SEQ ID NO: 663 - DNA, 4398 bp, HOMO SAPIENS
gggcgacgagtgcgggcctcggagcgactgcagcggcggcggcggacgcggcctgaggcgagcggcggggcgtggggcggtgcctcggcccgggctcgccctcgccggcgggagcgtccatggcccccgggcgccggcggggcgcggccgcggcctgaggggccatgtccggggtggtgcggaccctcagccgctgcctgctgccggccgaggccggcggggcccgcgagcgcagggcgggcagcggcgcgcgcgacgcggagcgcgaggcccggaggcgtagccgcgacatcgacgcgctgctggcccgcgagcggcgcgcggtccggcgcctggtgaagatcctgctgctgggcgcgggcgagagcggcaagtccacgttcctcaagcagatgcgcatcatccacggccgcgagttcgaccagaaggcgctgctggagttccgcgacaccatcttcgacaacatcctcaagggctcaagggttcttgttgatgcacgagataagcttggcattccttggcagtattctgaaaatgagaagcatgggatgttcctgatggccttcgagaacaaggcggggctgcctgtggagccggccaccttccagctgtacgtcccggccctgagcgcactctggagggattctggcatcagggaggctttcagccggagaagcgagtttcagctgggggagtcggtgaagtacttcctggacaacttggaccggatcggccagctgaattactttcctagtaagcaagatatcctgctggctaggaaagccaccaagggaattgtggagcatgacttcgttattaagaagatcccctttaagatggtggatgtgggcggccagcggtcccagcgccagaagtggttccagtgcttcgacgggatcacgtccatcctgttcatggtctcctccagcgagtacgaccaggtcctcatggaggacaggcgcaccaaccggctggtggagtccatgaacatcttcgagaccatcgtcaacaacaagctcttcttcaacgtctccatcattctcttcctcaacaagatggacctcctggtggagaaggtgaagaccgtgagcatcaagaagcacttcccggacttcaggggcgacccgcacaggctggaggacgtccagcgctacctggtccagtgcttcgacaggaagagacggaaccgcagcaagccactcttccaccacttcaccaccgccatcgacaccgagaacgtccgcttcgtgttccatgctgtgaaagacaccatcctgcaggagaacctgaaggacatcatgctgcagtgagcgaggaagccccggggtttgtcgtcgttgagcagcccccacggctgtcggtcagactcttgggtgtgtgttgtctgtgtggtccttgagtgggtttctcggatccgtgccctggaatacctggctcaggaatgctgtcagaccagccagccagcgagctctaggcaaaaggacatggaaactgtcacgttagctactgaatcctgggggcgagtgaaactactgaaaatccgagtgatgatgttgtgaatacggaacacctaatcacacagcttgctttgcttttacagaaacgttcctctttttctgacgcagtttaattgaggaccgtgttgtgtgtgtatgtgtgtacacacgctctgtctttaatgacagaaacacaaaaaccagctggccttgcagacggcttttctaactcacaagtcttccctgagacagactaacctgaaagctttgcctaacagtagcttgtagagatccagtgcacgccgatgctgctaaactcagtgcctgagcccggccctgcagccccagccgcagtgtctgaaggccacctcccaaagggagcacgttgccttttcaaactcccgtgccgatttcctaagagcccctagtccaagcctctcagatgaagctgaggagccgtgcctaggatcccttcccagctctgaggacgggctgcagagctctgcaggtgtggattcaccttacgcccctacagcaggctcagcccttcccaccctgccccatgcccagcagcacaacacggagtgagacaggatgcccacggtgactgccgctccgtccgtgcacacacagcggtgctcttctccccttagccacccactgcccaacccaacggcaaagacacagaaaccaggtccccttgcagacggctctcccatcttcctgcaagtcatctgctcacacacagttggcagcacatagcgtttccttctttcagaaacattcctcttctggggcttcagaaagctggcaaggccactagcagagcttttgttaatgccccagctgcttggcgagctaacagctgacctttcgggaagcccacagacgctggaggaatcttgagtttctccaaactgccgctccaccagtgcctttggacagccgtgcctgttcgccgctctccctaagtctgattctcatcgaggcccctcgcttctatgactgtgcttgcagaagagtaaacactctcggatgccgctgtcctgggggagcccgcgggagcctgtgaatgttgatacgagctggccagtcctgggcccagctcacttgtccagctacctgccaggtggctttcactgtgtttaaaatacattgcattccaagctggtcccctctgtgtatcactctactgagaaatcctgcctagtgtgttttgggatgtgtcctagcatttacaagaaaatgaaaagcgtcctcttaattggcacccgaatgttgctgtggctcagtcacatatcccagggccctcgtcccgaggccgtgctgccccgagccccgagcccctctgcagctcacccttggcttgttttccgcaaacccggtaaacgcaagcccttggggcagatgcagaagcagaagagggaggggaaacctgcctctgggtcaccctgttagcacagcgttctcatcgggagacagcatggaactctctctcgcagtgctcgaggctgtgtgtcagtgtttgctgggcttgtggctccttttttggctggataaagaagtcgctgtttttgtactgcttctgtggctcttcacagacctcacggatgtgaccggagatgagtgccgatgaccacgttttaaaggagaaagagagctcctggtggggccctcggggtggtctcaggtcccatttgcagtctgcaacagtgacgcgcagcccggtccggagcgtggtgagctttgtttgccttctgggtcagctttcgctgtgtctcctgtgtgtgttagaatccagagcccagaggaagtgcaagcgggtcctccgccaacggggagagcctcttcgcggcgctgttggcgacagcagcgctgtgattcgcgtagcaggggagttgtttgaaacaccttcctgagtagtccggccttgtcaatgagtgcttgttttcctttaaacagtctgacatatttactcgtcactttcaaaccagaagcatgagaggaaggagatattgtggggtccgtttaactcgatagaaagcgcagggggatggcccccggcgcgggctcttgacccgctcagcgctgaccccaccgccctggccgaggcacttggccttgctgagctggacttcctcctcctcctcctcatgaccggggtgaattagaacgtttttaaagacacccccttccaaattctgtaacacattgtaattggagaagaaggaaactctgcaaggctaaactgtcattcacaacttggctacacatagactctagtcagttttgtctccagaaccttaggcttttgtattttttaattttaatttcactgttaatccttattgtcttttttattaagatgttggaaaagcaggaggtagttgtgcctcaattattgcaaaaatgtaacaataaagttcctcaaaataagatctgttcctcatagctatactgtgtacacataagacgcatatagggttttactgaaatctatttttaactcttatgttcgtagagaaattgtttcaaggattttgagtcataggtctgtaatttatagagatctctagaattcttattgtaattttcctacttctttgataaaagaaaaataagtcagattgttaactccaagattgaaaaaaaaaactcttgaaagaagattattagttgtaactaatttaggggttctgggcacagacatctaacctggtattgtaaggcagaggctcccattggaatggtagtggtccgggtcagttgttcatggtgtaagctttgcacagtgtattaacattgggagggtctggcttgaaaatttggccaccctcagcctctgaatgtttattaaaataaatttagtctttctttgcttaatataaaaaaaaaaaaaaaa

SEQ ID NO: 664 - DNA, 5880 bp, HOMO SAPIENS
tggcacagatctccagaaacccttgtaatttcctgagtgacaggggtgatagaaacatcttttattagaatacttggtcttggttcctgacacaagagcttctaagacctttggaatctccaagtgataagagtgtatgacagtgagctaactggtggctgggatcctttagacaacttcaggatgggggctatcccctgaaagactaaggcatgattagaggtctgggatttgcagccccacgcctcgacctccagagagggtaaaagggctggagattgattaaccaccagttgccagtgatttaaccaatcatgcctaagtgatggcacctccattaaaaaataaaccacaggtttggagagctttcggtttggttaaccccaaccacataccaagaaggcgatgcacctcaaactgcatgaagacaaaaggtcctgtgctcacctgggacccttctggacgttgccctgtgtacctcttcgactgcctgttcatctacgacgaaccccgggtattgaccccagacaacaatgccacttcatattggggacttcgtctgggattccaaggtgcattcattgcaaagttccttaaatattttctcactgcttcctactaaaggacggacagagcatttgttcttcagccacatactttccttccactggccagcattctcctctattagactagaactgtggataaacctcagatgtgaatttcttcggagtaagaaatcctcagaggaaattacccagtatattcaaagctacaagggatttgttgacataacgggagaacattttgtgaattcctgggtccagagagaattacctatggcatcagcttattgcaatgacagcatctttgcttacgaagaactacggctggactcttttaaggactggccccgggaatcagctgtgggagttgcagcactggccaaagcaggtcttttctacacaggtataaaggacatcgtccagtgcttttcctgtggagggtgtttagagaaatggcaggaaggtgatgacccattagacgatcacaccagatgttttcccaattgtccatttctccaaaatatgaagtcctctgcggaagtgactccagaccttcagagccgtggtgaactttgtgaattactggaaaccacaagtgaaagcaatcttgaagattcaatagcagttggtcctatagtgccagaaatggcacagggtgaagcccagtggtttcaagaggcaaagaatctgaatgagcagctgagagcagcttataccagcgccagtttccgccacatgtctttgcttgatatctcttccgatctggccacggaccacttgctgggctgtgatctgtctattgcttcaaaacacatcagcaaacctgtgcaagaacctctggtgctgcctgaggtctttggcaacttgaactctgtcatgtgtgtggagggtgaagctggaagtggaaagacggtcctcctgaagaaaatagcttttctgtgggcatctggatgctgtcccctgttaaacaggttccagctggttttctacctctcccttagttccaccagaccagacgaggggctggccagtatcatctgtgaccagctcctagagaaagaaggatctgttactgaaatgtgcgtgaggaacattatccagcagttaaagaatcaggtcttattccttttagatgactacaaagaaatatgttcaatccctcaagtcataggaaaactgattcaaaaaaaccacttatcccggacctgcctattgattgctgtccgtacaaacagggccagggacatccgccgatacctagagaccattctagagatcaaagcatttcccttttataatactgtctgtatattacggaagctcttttcacataatatgactcgtctgcgaaagtttatggtttactttggaaagaaccaaagtttgcagaagatacagaaaactcctctctttgtggcggcgatctgtgctcattggtttcagtatccttttgacccatcctttgatgatgtggctgttttcaagtcctatatggaacgcctttccttaaggaacaaagcgacagctgaaattctcaaagcaactgtgtcctcctgtggtgagctggccttgaaagggtttttttcatgttgctttgagtttaatgatgatgatctcgcagaagcaggggttgatgaagatgaagatctaaccatgtgcttgatgagcaaatttacagcccagagactaagaccattctaccggtttttaagtcctgccttccaagaatttcttgcggggatgaggctgattgaactcctggattcagataggcaggaacatcaagatttgggactgtatcatttgaaacaaatcaactcacccatgatgactgtaagcgcctacaacaattttttgaactatgtctccagcctcccttcaacaaaagcagggcccaaaattgtgtctcatttgctccatttagtggataacaaagagtcattggagaatatatctgaaaatgatgactacttaaagcaccagccagaaatttcactgcagatgcagttacttaggggattgtggcaaatttgtccacaagcttacttttcaatggtttcagaacatttactggttcttgccctgaaaactgcttatcaaagcaacactgttgctgcgtgttctccatttgttttgcaattccttcaagggagaacactgactttgggtgcgcttaacttacagtactttttcgaccacccagaaagcttgtcattgttgaggagcatccacttcccaatacgaggaaataagacatcacccagagcacatttttcagttctggaaacatgttttgacaaatcacaggtgccaactatagatcaggactatgcttctgcctttgaacctatgaatgaatgggagcgaaatttagctgaaaaagaggataatgtaaagagctatatggatatgcagcgcagggcatcaccagaccttagtactggctattggaaactttctccaaagcagtacaagattccctgtctagaagtcgatgtgaatgatattgatgttgtaggccaggatatgcttgagattctaatgacagttttctcagcttcacagcgcatcgaactccatttaaaccacagcagaggctttatagaaagcatccgcccagctcttgagctgtctaaggcctctgtcaccaagtgctccataagcaagttggaactcagcgcagccgaacaggaactgcttctcaccctgccttccctggaatctcttgaagtctcagggacaatccagtcacaagaccaaatctttcctaatctggataagttcctgtgcctgaaagaactgtctgtggatctggagggcaatataaatgttttttcagtcattcctgaagaatttccaaacttccaccatatggagaaattattgatccaaatttcagctgagtatgatccttccaaactagtaaaattaattcaaaattctccaaaccttcatgttttccatctgaagtgtaacttcttttcggattttgggtctctcatgactatgcttgtttcctgtaagaaactcacagaaattaagttttcggattcattttttcaagccgtcccatttgttgccagtttgccaaattttatttctctgaagatattaaatcttgaaggccagcaatttcctgatgaggaaacatcagaaaaatttgcctacattttaggttctcttagtaacctggaagaattgatccttcctactggggatggaatttatcgagtggccaaactgatcatccagcagtgtcagcagcttcattgtctccgagtcctctcatttttcaagactttgaatgatgacagcgtggtggaaattgccaaagtagcaatcagtggaggtttccagaaacttgagaacctaaagctttcaatcaatcacaagattacagaggaaggatacagaaatttctttcaagcactggacaacatgccaaacttgcaggagttggacatctccaggcatttcacagagtgtatcaaagctcaggccacaacagtcaagtctttgagtcaatgtgtgttacgactaccaaggctcattagactgaacatgttaagttggctcttggatgcagatgatattgcattgcttaatgtcatgaaagaaagacatcctcaatctaagtacttaactattctccagaaatggatactgccgttctctccaatcattcagaaataaaagattcagctaaaaactgctgaatcaataatttgtcttggggcatattgaggatgtaaaaaaagttgttgattaatgctaaaaaccaaattatccaaaattattttattaaatattgcatacaaaagaaaatgtgtaaggcttgctaaaaaacaaaacaaaacaaaacacagtcctgcatactcaccaccaagctcaagaaataaatcatcaccaatacctttgaggtccctgagtaatccaccccagctaaaggcaaacccttcaatcaagtttatacagcaaaccctccattgtccatggtcaacagggaaggggttggggacaggtctgccaatctatctaaaagccacaatatggaagaagtattcaatttatataataaatggctaacttaacggttgaatcactttcatacatggatgaaacgggtttaacacaggatccacatgaatcttctgtgggccaagagatgttccttaatccttgtagaacctgttttctatattgaactagctttggtacagtagagttaacttactttccatttatccactgccaatataaagaggaaacaggggttagggaaaaatgacttcattccagaggcttctcagagttcaacatatgctataatttagaattttcttatgaatccactctacttgggtagaaaatattttatctctagtgattgcatattatttccatatcatagtatttcatagtattatatttgatatgagtgtctatatcaatgtcagtgtccagaatttcgttcctaccagttaagtagttttctgaacggccagaagaccattcgaaattcatgatactactataagttggtaaacaaccatacttttatcctcatttttattctcactaagaaaaaagtcaactcccctccccttgcccaagtatgaaatatagggacagtatgtatggtgtggtctcatttgtttagaaaaccacttatgactgggtgcggtggctcacacctgtaatcccagcactttgggaggctgaggcgggcgaatcatttgaggtgaggaattcgagaccagcctggccagcatggtgaaaccccatctctactaaaaatacaaaaattagccaggtgtggtggcacatgcctgtagtcccagccactagggcggctgagacgcaagacttgcttgaacccgggaggcagaggttgcagtgagccaagatggcgccactgcattccagcctgggcaacagagcaagaccctgtctgtctcaaaacaaaaaacaaaaccacttatattgctagctacattaagaatttctgaatatgttactgagcttgcttgtggtaaccatttataatatcagaaagtatatgtacaccaaaacatgttgaacatccatgttgtacaactgaaatataaataattttgtcaattatacctaaataaaactggaaaaaaatttctggaagtttatatctaaaaatgttaatagtgcgtacctctaggaagtgggcctggaagccattcttacttttcagtctctcccattctgtactgttttttgttttactttcgtgcctgcattatttttctatttaaaacaaaaataaatctagtttagcact

SEQ ID NO: 665 - DNA, 1142 bp, HOMO SAPIENS; identical to SEQ ID NO: 652

SEQ ID NO: 666 - DNA, 3102 bp, HOMO SAPIENS
gcaccctacagatgcgggtctccgcccagccgcggtcacctggggggctgggggcggggcctgggcggggcggggttcggccgggagcgcaggggcggcagtgcgcgcctagcagtgtcccagccgggttcgtgtcgccatggggcagatcgagtgggccatgtgggccaacgaacaggcgctggcgtccggcctgatcctcatcaccgggggcatcgtggccacagctgggcgcttcacccagtggtactttggtgcctactccattgtggcgggcgtgtttgtgtgcctgctggagtacccccgggggaagaggaagaagggctccaccatggagcgctggggacagaagtacatgaccgccgtggtgaagctgttcgggccctttaccaggaattactatgttcgggccgtcctgcatctcctgctctcggtgcccgccggcttcctgctggccaccatccttgggaccgcctgcctggccattgcgagcggcatctacctactggtgagtggcgccctctgaggtcggccccggccacccccatccccagcccctgccctgacaccctcggacacgcatggcccttgaagccggctctgtaggctgagccaaggctgggagcaagtgtgagcctgggcgtgtgctcacagcacggcggggacgcagcggttgctgctgccatttttggcgtgtctagtgtgtcgggtcatttccttgcatttcctcattaacccgcaccacagccctgggaggggtactggggtccccactttacagacaaagatgcggaggctcagggaggtgctgtgactggcctggggtcacgcagccggccgaagaccgtgcctgcgcttgggtcccattatcaggcttttctcacctaaaccctattcgcgctgattcatgggcggtgccaggacgcagacattttcttaaactgccgacacctgcgtttggtttatgactgctgcaccctgttagaaggctgcccatcccatgggatacagtgatctctctgagaggccagggatgggtgggaggacagggcgcagcctggccaggccttgggtgaaatgccctctgcctgccctgggctccggaacagacggctgcaggccacctctcactgcgggggtctctgggtggacagagccctcagactttgcttatttaaatccttttgtccatagagccaagtccctcctgcccgcagaggcaactgccctccccttgctgtgcgtcttctagtgtgtgtgcgtgggaaaggtgcagcactttctgtgtacgccttccgcgtatggaagtggagttctgtttcaagcctcactgacctgccaccggcagaactctcctttagaaccccttcctgttgccaagtgctcatctgggctgttgctttgttttccgggggccacccgcatcccccccgtctccctgctgccacgcacagctagtggctcctggagacctcgggaggaattccttgtgctaaacccagagaggaattgctgggtcaggcatcagcctctgcaccgttcaccctgccgggctcagctgctccccagcagacaacccaccaccagccatgtggccccatctctcccaccatgcactaggctttctcccacgcttgccagtttcacagcacgagctggccgtgtggagcttggactcgcccttctctgactgtggatttgagctgttggagtttcttctcccttgagttgcctgttcaaatcctttgcccatttttctattgtggtttttgtatttttctttttcttcttttttttttgagatggagtctcgcgccatcgcccaggctggagtgcagtggcgtgatctcggctcactgcaaccttcgcctcctgggttcaagcaattctcctgcctcagcctcccgagtagctgggactacaggcacgtgccaccatgcctggctaatttttggtatttttagtagagacggggtttcaccgcgttagccaggatggtctggatctccttgaccttgtgatccgcccgcctcggcctcccaaagtgctgggattacaggcgtgagccaccgcgcccggcctgattgtctttttcttaagttgcaggaagtccacatatattttagctatttagcctttgtaacctttaaacactggggatgccttcatgctttctggtgagggtctgttaacttggcgcgtggagtccttcactgcacggaagagcagaggtttccctgttcacctgctctatggtctgtgctttgtgaaaacacctttccctggccctgggtcctgccttcacgttcctgccttttcttctatcagccttctagttttgcttttcagaatggaatgtttccgttttggagtcaggtaggatcacacatgtccagtttctctttctgttcatgacgtatatgatgtgacatatttttccaccagatattatgggatagaagatgaaaagcacacactcccaggtccacttgacctgttgcagtggaacctccgggcatgggcccaggagtctgtatttttagtaaaagccagtggaatcccgtggtcttcaagctctccccccaccacccccatgtgcagaaatgcctgggcacccttggggggctgccggccagcgtgggtgaatggcgcccaccagacggagcagggcctgctactctcctgggccacccctcctgctggacctcgggcctgcctccctgccttccctgcccttggcaccttgagaggagaatttgagtactagaatttgcatctgggagtgtccaccacgggatcttccagaagcccaggggttcgggccccactcctggcatgaagaaatagcttgggctggtgtcaggccgacccaggtcctggctgtgtggcctcgggcgcgtcacttaacctctctgagtggcagtcacaccatcctgcgtgggattcagacttgagcctgtcccagggcccctagcggggtgggcctccggggagggagggagggagggagggcgggcgctggggcgcggctcaacccttcagtgccccgcaggcggctgtgcgtggcgagcagtggacgcccatcgagcccaagccccggga

SEQ ID NO: 667 - DNA, 2379 bp, HOMO SAPIENS
gacccccgagctgtgctgctcgcggccgccaccgccgggccccggccgtccctggctcccctcctgcctcgagaagggcagggcttctcagaggcttggcgggaaaaagaacggagggagggatcgcgctgagtataaaagccggttttcggggctttatctaactcgctgtagtaattccagcgagaggcagagggagcgagcgggcggccggctagggtggaagagccgggcgagcagagctgcgctgcgggcgtcctgggaagggagatccggagcgaatagggggcttcgcctctggcccagccctcccgctgatcccccagccagcggtccgcaacccttgccgcatccacgaaactttgcccatagcagcgggcgggcactttgcactggaacttacaacacccgagcaaggacgcgactctcccgacgcggggaggctattctgcccatttggggacacttccccgccgctgccaggacccgcttctctgaaaggctctccttgcagctgcttagacgctggatttttttcgggtagtggaaaaccagcagcctcccgcgacgatgcccctcaacgttagcttcaccaacaggaactatgacctcgactacgactcggtgcagccgtatttctactgcgacgaggaggagaacttctaccagcagcagcagcagagcgagctgcagcccccggcgcccagcgaggatatctggaagaaattcgagctgctgcccaccccgcccctgtcccctagccgccgctccgggctctgctcgccctcctacgttgcggtcacacccttctcccttcggggagacaacgacggcggtggcgggagcttctccacggccgaccagctggagatggtgaccgagctgctgggaggagacatggtgaaccagagtttcatctgcgacccggacgacgagaccttcatcaaaaacatcatcatccaggactgtatgtggagcggcttctcggccgccgccaagctcgtctcagagaagctggcctcctaccaggctgcgcgcaaagacagcggcagcccgaaccccgcccgcggccacagcgtctgctccacctccagcttgtacctgcaggatctgagcgccgccgcctcagagtgcatcgacccctcggtggtcttcccctaccctctcaacgacagcagctcgcccaagtcctgcgcctcgcaagactccagcgccttctctccgtcctcggattctctgctctcctcgacggagtcctccccgcagggcagccccgagcccctggtgctccatgaggagacaccgcccaccaccagcagcgactctgaggaggaacaagaagatgaggaagaaatcgatgttgtttctgtggaaaagaggcaggctcctggcaaaaggtcagagtctggatcaccttctgctggaggccacagcaaacctcctcacagcccactggtcctcaagaggtgccacgtctccacacatcagcacaactacgcagcgcctccctccactcggaaggactatcctgctgccaagagggtcaagttggacagtgtcagagtcctgagacagatcagcaacaaccgaaaatgcaccagccccaggtcctcggacaccgaggagaatgtcaagaggcgaacacacaacgtcttggagcgccagaggaggaacgagctaaaacggagcttttttgccctgcgtgaccagatcccggagttggaaaacaatgaaaaggcccccaaggtagttatccttaaaaaagccacagcatacatcctgtccgtccaagcagaggagcaaaagctcatttctgaagaggacttgttgcggaaacgacgagaacagttgaaacacaaacttgaacagctacggaactcttgtgcgtaaggaaaagtaaggaaaacgattccttctaacagaaatgtcctgagcaatcacctatgaacttgtttcaaatgcatgatcaaatgcaacctcacaaccttggctgagtcttgagactgaaagatttagccataatgtaaactgcctcaaattggactttgggcataaaagaacttttttatgcttaccatcttttttttttctttaacagatttgtatttaagaattgtttttaaaaaattttaagatttacacaatgtttctctgtaaatattgccattaaatgtaaataactttaataaaacgtttatagcagttacacagaatttcaatcctagtatatagtacctagtattataggtactataaaccctaattttttttatttaagtacattttgctttttaaagttgatttttttctattgtttttagaaaaaataaaataactggcaaatatatcattgagccaaatcttaaaaaaaaaaaaaaa

SEQ ID NO: 668 - DNA, 696 bp, HOMO SAPIENS
ttccccccccccccccccccccccgcccgagcacaggacacagctgggttctgaagcttctgagttctgcagcctcacctctgagaaaacctcttttccaccaataccatgaagctctgcgtgactgtcctgtctctcctcatgctagtagctgccttctgctctccagcgctctcagcaccaatgggctcagaccctcccaccgcctgctgcttttcttacaccgcgaggaagcttcctcgcaactttgtggtagattactatgagaccagcagcctctgctcccagccagctgtggtattccaaaccaaaagaagcaagcaagtctgtgctgatcccagtgaatcctgggtccaggagtacgtgtatgacctggaactgaactgagctgctcagagacaggaagtcttcagggaaggtcacctgagcccggatgcttctccatgagacacatctcctccatactcaggactcctctccgcagttcctgtcccttctcttaatttaatcttttttatgtgccgtgttattgtattaggtgtcatttccattatttatattagtttagccaaaggataagtgtcctatggggatggtccactgtcactgtttctctgctgttgcaaatacatggataacacatttgattctgtgtgttttccataataaaactttaaaataaaatgcagacagtta

SEQ ID NO: 669 - DNA, 781 bp, HOMO SAPIENS
acacagagagaaaggctaaagttctctggaggatgtggctgcagagcctgctgctcttgggcactgtggcctgcagcatctctgcacccgcccgctcgcccagccccagcacgcagccctgggagcatgtgaatgccatccaggaggcccggcgtctcctgaacctgagtagagacactgctgctgagatgaatgaaacagtagaagtcatctcagaaatgtttgacctccaggagccgacctgcctacagacccgcctggagctgtacaagcagggcctgcggggcagcctcaccaagctcaagggccccttgaccatgatggccagccactacaagcagcactgccctccaaccccggaaacttcctgtgcaacccagattatcacctttgaaagtttcaaagagaacctgaaggactttctgcttgtcatcccctttgactgctgggagccagtccaggagtgagaccggccagatgaggctggccaagccggggagctgctctctcatgaaacaagagctagaaactcaggatggtcatcttggagggaccaaggggtgggccacagccatggtgggagtggcctggacctgccctgggccacactgaccctgatacaggcatggcagaagaatgggaatattttatactgacagaaatcagtaatatttatatatttatatttttaaaatatttatttatttatttatttaagttcatattccatatttattcaagatgttttaccgtaataattattattaaaaatatgcttcta

SEQ ID NO: 670 - DNA, 4909 bp, HOMO SAPIENS
tagacgcaccctctgaagatggtgactccctcctgagaagctggaccccttggtaaaagacaaggccttctccaagaagaatatgaaagtgttactcagacttatttgtttcatagctctactgatttcttctctggaggctgataaatgcaaggaacgtgaagaaaaaataattttagtgtcatctgcaaatgaaattgatgttcgtccctgtcctcttaacccaaatgaacacaaaggcactataacttggtataaagatgacagcaagacacctgtatctacagaacaagcctccaggattcatcaacacaaagagaaactttggtttgttcctgctaaggtggaggattcaggacattactattgcgtggtaagaaattcatcttactgcctcagaattaaaataagtgcaaaatttgtggagaatgagcctaacttatgttataatgcacaagccatatttaagcagaaactacccgttgcaggagacggaggacttgtgtgcccttatatggagttttttaaaaatgaaaataatgagttacctaaattacagtggtataaggattgcaaacctctacttcttgacaatatacactttagtggagtcaaagataggctcatcgtgatgaatgtggctgaaaagcatagagggaactatacttgtcatgcatcctacacatacttgggcaagcaatatcctattacccgggtaatagaatttattactctagaggaaaacaaacccacaaggcctgtgattgtgagcccagctaatgagacaatggaagtagacttgggatcccagatacaattgatctgtaatgtcaccggccagttgagtgacattgcttactggaagtggaatgggtcagtaattgatgaagatgacccagtgctaggggaagactattacagtgtggaaaatcctgcaaacaaaagaaggagtaccctcatcacagtgcttaatatatcggaaattgaaagtagattttataaacatccatttacctgttttgccaagaatacacatggtatagatgcagcatatatccagttaatatatccagtcactaatttccagaagcacatgattggtatatgtgtcacgttgacagtcataattgtgtgttctgttttcatctataaaatcttcaagattgacattgtgctttggtacagggattcctgctatgattttctcccaataaaagcttcagatggaaagacctatgacgcatatatactgtatccaaagactgttggggaagggtctacctctgactgtgatatttttgtgtttaaagtcttgcctgaggtcttggaaaaacagtgtggatataagctgttcatttatggaagggatgactacgttggggaagacattgttgaggtcattaatgaaaacgtaaagaaaagcagaagactgattatcattttagtcagagaaacatcaggcttcagctggctgggtggttcatctgaagagcaaatagccatgtataatgctcttgttcaggatggaattaaagttgtcctgcttgagctggagaaaatccaagactatgagaaaatgccagaatcgattaaattcattaagcagaaacatggggctatccgctggtcaggggactttacacagggaccacagtctgcaaagacaaggttctggaagaatgtcaggtaccacatgccagtccagcgacggtcaccttcatctaaacaccagttactgtcaccagccactaaggagaaactgcaaagagaggctcacgtgcctctcgggtagcatggagaagttgccaagagttctttaggtgcctcctgtcttatggcgttgcaggccaggttatgcctcatgctgacttgcagagttcatggaatgtaactatatcatcctttatccctgaggtcacctggaatcagattattaagggaataagccatgacgtcaatagcagcccagggcacttcagagtagagggcttgggaagatcttttaaaaaggcagtaggcccggtgtggtggctcacgcctataatcccagcactttgggaggctgaagtgggtggatcaccagaggtcaggagttcgagaccagcccagccaacatggcaaaaccccatctctactaaaaatacaaaaatgagctaggcatggtggcacacgcctgtaatcccagctacacctgaggctgaggcaggagaattgcttgaaccggggagacggaggttgcagtgagccgagtttgggccactgcactctagcctggcaacagagcaagactccgtctcaaaaaaagggcaataaatgccctctctgaatgtttgaactgccaagaaaaggcatggagacagcgaactagaagaaagggcaagaaggaaatagccaccgtctacagatggcttagttaagtcatccacagcccaagggcggggctatgccttgtctggggaccctgtagagtcactgaccctggagcggctctcctgagaggtgctgcaggcaaagtgagactgacacctcactgaggaagggagacatattcttggagaactttccatctgcttgtattttccatacacatccccagccagaagttagtgtccgaagaccgaattttattttacagagcttgaaaactcacttcaatgaacaaagggattctccaggattccaaagttttgaagtcatcttagctttccacaggagggagagaacttaaaaaagcaacagtagcagggaattgatccacttcttaatgctttcctccctggcatgaccatcctgtcctttgttattatcctgcattttacgtctttggaggaacagctccctagtggcttcctccgtctgcaatgtcccttgcacagcccacacatgaaccatccttcccatgatgccgctcttctgtcatcccgctcctgctgaaacacctcccaggggctccacctgttcaggagctgaagcccatgctttcccaccagcatgtcactcccagaccacctccctgccctgtcctccagcttcccctcgctgtcctgctgtgtgaattcccaggttggcctggtggccatgtcgcctgcccccagcactcctctgtctctgctcttgcctcgacccttcctcctcctttgcctaggaggccttctcgcattttctctagctgatcagaattttaccaaaattcagaacatcctccaattccacagtctctgggagactttccctaagaggcgacttcctctccagccttctctctctggtcaggcccactgcagagatggtggtgagcacatctgggaggctggtctccctccagctggaattgctgctctctgagggagaggctgtggtggctgtctctgtccctcactgccttccaggagcaatttgcacatgtaacatagatttatgtaatgctttatgtttaaaaacattccccaattatcttatttaatttttgcaattattctaattttatatatagagaaagtgacctattttttaaaaaaatcacactctaagttctattgaacctaggacttgagcctccatttctggcttctagtctggtgttctgagtacttgatttcaggtcaataacggtcccccctcactccacactggcacgtttgtgagaagaaatgacattttgctaggaagtgaccgagtctaggaatgcttttattcaagacaccaaattccaaacttctaaatgttggaattttcaaaaattgtgtttagattttatgaaaaactcttctactttcatctattctttccctagaggcaaacatttcttaaaatgtttcattttcattaaaaatgaaagccaaatttatatgccaccgattgcaggacacaagcacagttttaagagttgtatgaacatggagaggacttttggtttttatatttctcgtatttaatatgggtgaacaccaacttttatttggaataataattttcctcctaaacaaaaacacattgagtttaagtctctgactcttgcctttccacctgctttctcctgggcccgctttgcctgcttgaaggaacagtgctgttctggagctgctgttccaacagacagggcctagctttcatttgacacacagactacagccagaagcccatggagcagggatgtcacgtcttgaaaagcctattagatgttttacaaatttaattttgcagattattttagtctgtcatccagaaaatgtgtcagcatgcatagtgctaagaaagcaagccaatttggaaacttaggttagtgacaaaattggccagagagtgggggtgatgatgaccaagaattacaagtagaatggcagctggaatttaaggagggacaagaatcaatggataagcgtgggtggaggaagatccaaacagaaaagtgcaaagttattccccatcttccaagggttgaattctggaggaagaagacacattcctagttccccgtgaacttcctttgacttattgtccccactaaaacaaaacaaaaaacttttaatgccttccacattaattagattttcttgcagtttttttatggcatttttttaaagatgccctaagtgttgaagaagagtttgcaaatgcaacaaaatatttaattaccggttgttaaaactggtttagcacaatttatattttccctctcttgcctttcttatttgcaataaaaggtattgagccattttttaaatgacatttttgataaattatgtttgtactagttgatgaaggagttttttttaacctgtttatataattttgcagcagaagccaaattttttgtatattaaagcaccaaattcatgtacagcatgcatcacggatcaatagactgtacttattttccaataaaattttcaaactttgtactgttaaa

SEQ ID NO: 671 - DNA, 2857 bp, HOMO SAPIENS
ttccccatctgaggcgtttgttgcagctacctgcacttctagatgctccccaggttcatcctgtgtcgtctcccccacctaccagtcatcttcttgtgagccctgggcttaggagtcaccatggcaactgaagagttcatcatccgcatccccccataccactatatccatgtgctggaccagaacagcaacgtgtcccgtgtggaggtcgggccaaagacctacatccggcaggacaatgagagggtactgtttgcccccatgcgcatggtgaccgtccccccacgtcactactgcacagtggccaaccctgtgtctcgggatgcccagggcttggtgctgtttgatgtcacagggcaagttcggcttcgccacgctgacctcgagatccggctggcccaggaccccttccccctgtacccaggggaggtgctggaaaaggacatcacacccctgcaggtggttctgcccaacactgccctccatctaaaggcgctgcttgattttgaggataaagatggagacaaggtggtggcaggagatgagtggcttttcgagggacctggcacgtacatcccccggaaggaagtggaggtcgtggagatcattcaggccaccatcatcaggcagaaccaggctctgcggctcagggcccgcaaggagtgctgggaccgggacggcaaggagagggtgacaggggaagaatggctggtcaccacagtaggggcgtacctcccagcggtgtttgaggaggttctggatttggtggacgccgtcatccttacggaaaagacagccctgcacctccgggctcggcggaacttccgggacttcaggggagtgtcccgccgcactggggaggagtggctggtaacagtgcaggacacagaggcccacgtgccagatgtccacgaggaggtgctgggggttgtgcccatcaccaccctgggcccccacaactactgcgtgattctcgaccctgtcggaccggatggcaagaatcagctggggcagaagcgcgtggtcaagggagagaagtcttttttcctccagccaggagagcagctggaacaaggcatccaggatgtgtatgtgctgtcggagcagcaggggctgctgctgagggccctgcagcccctggaggagggggaggatgaggagaaggtctcacaccaggctggggaccactggctcatccgcggacccctggagtatgtgccatctgccaaagtggaggtggtggaggagcgccaggccatccctctagacgagaacgagggcatctatgtgcaggatgtcaagaccggaaaggtgcgcgctgtgattggaagcacctacatgctgacccaggacgaagtcctgtgggagaaagagctgcctcccggggtggaggagctgctgaacaaggggcaggaccctctggcagacaggggtgagaaggacacagctaagagcctccagcccttggcgccccggaacaagacccgtgtggtcagctaccgcgtgccccacaacgctgcggtgcaggtgtacgactaccgagagaagcgagcccgcgtggtcttcgggcctgagctggtgtcgctgggtcctgaggagcagttcacagtgttgtccctctcagctgggcggcccaagcgtccccatgcccgccgtgcgctctgcctgctgctggggcctgacttcttcacagacgtcatcaccatcgaaacggcggatcatgccaggctgcaactgcagctggcctacaactggcactttgaggtgaatgaccggaaggacccccaagagacggccaagctcttttcagtgccagactttgtaggtgatgcctgcaaagccatcgcatcccgggtgcggggggccgtggcctctgtcactttcgatgacttccataagaactcagcccgcatcattcgcactgctgtctttggctttgagacctcggaagcgaagggccccgatggcatggccctgcccaggccccgggaccaggctgtcttcccccaaaacgggctggtggtcagcagtgtggacgtgcagtcagtggagcctgtggatcagaggacccgggacgccctgcaacgcagcgtccagctggccatcgagatcaccaccaactcccaggaagcggcggccaagcatgaggctcagagactggagcaggaagcccgcggccggcttgagcggcagaagatcctggaccagtcagaagccgagaaagctcgcaaggaacttttggagctggaggctctgagcatggccgtggagagcaccgggactgccaaggcggaggccgagtcccgtgcggaggcagcccggattgagggagaagggtccgtgctgcaggccaagctaaaagcacaggccttggccattgaaacggaggctgagctccagagggtccagaaggtccgagagctggaactggtctatgcccgggcccagctggagctggaggtgagcaaggctcagcagctggctgaggtggaggtgaagaagttcaagcagatgacagaggccataggccccagcaccatcagggaccttgctgtggctgggcctgagatgcaggtaaaactgctccagtccctgggcctgaaatcaaccctcatcaccgatggctccactcccatcaacctcttcaacacagcctttgggctgctggggatggggcccgagggtcagcccctgggcagaagggtggccagtgggcccagccctggggaggggatatccccccagtctgctcaggcccctcaagctcctggagacaaccacgtggtgcctgtactgcgctaactcctgattaatacaatggaagtttctgggcaaaaaaaaaaaaaaaaagtttcca

SEQ ID NO: 672 - DNA, 5265 bp, HOMO SAPIENS
acatttgaaaatcaccccactgcaaactcctccccctgctagaaacctcacattgaaatgctgtaaatgacgtgggccccgagtgcaatcgcgggaagccagggtttccagctaggacacagcaggtcgtgatccgggtcgggacactgcctggcagaggctgcgagcatggggccctggggctggaaattgcgctggaccgtcgccttgctcctcgccgcggcggggactgcagtgggcgacagatgcgaaagaaacgagttccagtgccaagacgggaaatgcatctcctacaagtgggtctgcgatggcagcgctgagtgccaggatggctctgatgagtcccaggagacgtgcttgtctgtcacctgcaaatccggggacttcagctgtgggggccgtgtcaaccgctgcattcctcagttctggaggtgcgatggccaagtggactgcgacaacggctcagacgagcaaggctgtccccccaagacgtgctcccaggacgagtttcgctgccacgatgggaagtgcatctctcggcagttcgtctgtgactcagaccgggactgcttggacggctcagacgaggcctcctgcccggtgctcacctgtggtcccgccagcttccagtgcaacagctccacctgcatcccccagctgtgggcctgcgacaacgaccccgactgcgaagatggctcggatgagtggccgcagcgctgtaggggtctttacgtgttccaaggggacagtagcccctgctcggccttcgagttccactgcctaagtggcgagtgcatccactccagctggcgctgtgatggtggccccgactgcaaggacaaatctgacgaggaaaactgcgctgtggccacctgtcgccctgacgaattccagtgctctgatggaaactgcatccatggcagccggcagtgtgaccgggaatatgactgcaaggacatgagcgatgaagttggctgcgttaatgtgacactctgcgagggacccaacaagttcaagtgtcacagcggcgaatgcatcaccctggacaaagtctgcaacatggctagagactgccgggactggtcagatgaacccatcaaagagtgcgggaccaacgaatgcttggacaacaacggcggctgttcccacgtctgcaatgaccttaagatcggctacgagtgcctgtgccccgacggcttccagctggtggcccagcgaagatgcgaagatatcgatgagtgtcaggatcccgacacctgcagccagctctgcgtgaacctggagggtggctacaagtgccagtgtgaggaaggcttccagctggacccccacacgaaggcctgcaaggctgtgggctccatcgcctacctcttcttcaccaaccggcacgaggtcaggaagatgacgctggaccggagcgagtacaccagcctcatccccaacctgaggaacgtggtcgctctggacacggaggtggccagcaatagaatctactggtctgacctgtcccagagaatgatctgcagcacccagcttgacagagcccacggcgtctcttcctatgacaccgtcatcagcagagacatccaggcccccgacgggctggctgtggactggatccacagcaacatctactggaccgactctgtcctgggcactgtctctgttgcggataccaagggcgtgaagaggaaaacgttattcagggagaacggctccaagccaagggccatcgtggtggatcctgttcatggcttcatgtactggactgactggggaactcccgccaagatcaagaaagggggcctgaatggtgtggacatctactcgctggtgactgaaaacattcagtggcccaatggcatcaccctagatctcctcagtggccgcctctactgggttgactccaaacttcactccatctcaagcatcgatgtcaacgggggcaaccggaagaccatcttggaggatgaaaagaggctggcccaccccttctccttggccgtctttgaggacaaagtattttggacagatatcatcaacgaagccattttcagtgccaaccgcctcacaggttccgatgtcaacttgttggctgaaaacctactgtccccagaggatatggttctcttccacaacctcacccagccaagaggagtgaactggtgtgagaggaccaccctgagcaatggcggctgccagtatctgtgcctccctgccccgcagatcaacccccactcgcccaagtttacctgcgcctgcccggacggcatgctgctggccagggacatgaggagctgcctcacagaggctgaggctgcagtggccacccaggagacatccaccgtcaggctaaaggtcagctccacagccgtaaggacacagcacacaaccacccgacctgttcccgacacctcccggctgcctggggccacccctgggctcaccacggtggagatagtgacaatgtctcaccaagctctgggcgacgttgctggcagaggaaatgagaagaagcccagtagcgtgagggctctgtccattgtcctccccatcgtgctcctcgtcttcctttgcctgggggtcttccttctatggaagaactggcggcttaagaacatcaacagcatcaactttgacaaccccgtctatcagaagaccacagaggatgaggtccacatttgccacaaccaggacggctacagctacccctcgagacagatggtcagtctggaggatgacgtggcgtgaacatctgcctggagtcccgtccctgcccagaacccttcctgagacctcgccggccttgttttattcaaagacagagaagaccaaagcattgcctgccagagctttgttttatatatttattcatctgggaggcagaacaggcttcggacagtgcccatgcaatggcttgggttgggattttggtttcttcctttcctcgtgaaggataagagaaacaggcccggggggaccaggatgacacctccatttctctccaggaagttttgagtttctctccaccgtgacacaatcctcaaacatggaagatgaaaggggaggggatgtcaggcccagagaagcaagtggctttcaacacacaacagcagatggcaccaacgggaccccctggccctgcctcatccaccaatctctaagccaaacccctaaactcaggagtcaacgtgtttacctcttctatgcaagccttgctagacagccaggttagcctttgccctgtcacccccgaatcatgacccacccagtgtctttcgaggtgggtttgtaccttccttaagccaggaaagggattcatggcgtcggaaatgatctggctgaatccgtggtggcaccgagaccaaactcattcaccaaatgatgccacttcccagaggcagagcctgagtcactggtcacccttaatatttattaagtgcctgagacacccggttaccttggccgtgaggacacgtggcctgcacccaggtgtggctgtcaggacaccagcctggtgcccatcctcccgacccctacccacttccattcccgtggtctccttgcactttctcagttcagagttgtacactgtgtacatttggcatttgtgttattattttgcactgttttctgtcgtgtgtgttgggatgggatcccaggccagggaaagcccgtgtcaatgaatgccggggacagagaggggcaggttgaccgggacttcaaagccgtgatcgtgaatatcgagaactgccattgtcgtctttatgtccgcccacctagtgcttccacttctatgcaaatgcctccaagccattcacttccccaatcttgtcgttgatgggtatgtgtttaaaacatgcacggtgaggccgggcgcagtggctcacgcctgtaatcccagcactttgggaggccgaggcgggtggatcatgaggtcaggagatcgagaccatcctggctaacacgtgaaaccccgtctctactaaaaatacaaaaaattagccgggcgtggtggcgggcacctgtagtcccagctactcgggaggctgaggcaggagaatggtgtgaacccgggaagcggagcttgcagtgagccgagattgcgccactgcagtccgcagtctggcctgggcgacagagcgagactccgtctcaaaaaaaaaaaacaaaaaaaaaccatgcatggtgcatcagcagcccatggcctctggccaggcatggcgaggctgaggtgggaggatggtttgagctcaggcatttgaggctgtcgtgagctatgattatgccactgctttccagcctgggcaacatagtaagaccccatctcttaaaaaatgaatttggccagacacaggtgcctcacgcctgtaatcccagcactttgggaggctgagctggatcacttgagttcaggagttggagaccaggcctgagcaacaaagcgagatcccatctctacaaaaaccaaaaagttaaaaatcagctgggtacggtggcacgtgcctgtgatcccagctacttgggaggctgaggcaggaggatcgcctgagcccaggaggtggaggttgcagtgagccatgatcgagccactgcactccagcctgggcaacagatgaagaccctatttcagaaatacaactataaaaaaataaataaatcctccagtctggatcgtttgacgggacttcaggttctttctgaaatcgccgtgttactgttgcactgatgtccggagagacagtgacagcctccgtcagactcccgcgtgaagatgtcacaagggattggcaattgtccccagggacaaaacactgtgtcccccccagtgcagggaaccgtgataagcctttctggtttcggagcacgtaaatgcgtccctgtacagatagtggggattttttgttatgtttgcactttgtatattggttgaaactgttatcacttatatatatatatatacacacatatatataaaatctatttatttttgcaaaccctggttgctgtatttgttcagtgactattctcggggccctgtgtagggggttattgcctctgaaatgcctcttctttatgtacaaagattatttgcacgaactggactgtgtgcaacgctttttgggagaatgatgtccccgttgtatgtatgagtggcttctgggagatgggtgtcactttttaaaccactgtatagaaggtttttgtagcctgaatgtcttactgtgatcaattaaatttcttaaatgaaccaatttgtctaaa

SEQ ID NO: 673 - DNA, 3734 bp, HOMO SAPIENS
cctgttcctcttaccctgcccggctccagctgaccagggaaggggtgggctgaactgaggcgggggcaagggagtgcccgacatcttgtccgactccgcgggtgacacgagccggttctctctggactggtggcagcgcgcggccccgaaccgcgccccaggccggcaggcggggaaggagccggtgggggtagggggtgcggtggggggtggggaccctccggctcttgggggtcccagtccccgccggctgctgagcgggtggggtggtggaggagctgcagagatgtccggccagagcctgacggaccgaatcactgccgcccagcacagtgtcaccggctctgccgtatccaagacagtatgcaaggccacgacccacgagatcatggggcccaagaaaaagcacctggactacttaattcagtgcacaaatgagatgaatgtgaacatcccacagttggcagacagtttatttgaaagaactactaatagtagttgggtggtggtcttcaaatctctcattacaactcatcatttgatggtgtatggaaatgagcgttttattcagtatttggcttcaagaaacacgttgtttaacttaagcaattttttggataaaagtggattgcaaggatatgacatgtctacatttattaggcggtatagtagatatttaaatgagaaagcagtttcatacagacaagttgcatttgatttcacaaaagtgaagagaggggctgatggagttatgagaacaatgaacacagaaaaactcctaaaaactgtaccaattattcagaatcagatggatgcacttcttgattttaatgttaatagcaatgaacttacaaatggggtaataaatgctgccttcatgctcctgttcaaagatgccattagactgtttgcagcatacaatgaaggaattattaatttgttggaaaaatattttgatatgaaaaagaaccaatgcaaagaaggtcttgacatctataagaagttcctaactaggatgacaagaatctcagagttcctcaaagttgcagagcaagttggaattgacagaggtgatataccagacctttcacaggcccctagcagtcttcttgatgctttggaacaacatttagcttccttggaaggaaagaaaatcaaagattctacagctgcaagcagggcaactacactttccaatgcagtgtcttccctggcaagcactggtctatctctgaccaaagtggatgaaagggaaaagcaggcagcattagaggaagaacaggcacgtttgaaagctttaaaggaacagcgcctaaaagaacttgcaaagaaacctcatacctctttaacaactgcagcctctcctgtatccacctcagcaggagggataatgactgcaccagccattgacatattttctacccctagttcttctaacagcacatcaaagctgcccaatgatctgcttgatttgcagcagccaacttttcacccatctgtacatcctatgtcaactgcttctcaggtagcaagtacatggggaggattcactccttctccagttgcacagccacacccttcagctggccttaatgttgactttgaatctgtgtttggaaataaatctacaaatgttattgtagattctgggggctttgatgaactaggtggacttctcaaaccaacagtggcctctcagaaccagaaccttcctgttgccaaactcccacctagcaagttagtatctgatgacttggattcatctttagccaaccttgtgggcaatcttggcatcggaaatggaaccactaagaatgatgtaaattggagtcaaccaggtgaaaagaagttaactgggggatctaactggcaaccaaaggttgcaccaacaaccgcttggaatgctgcaacaatgaatggcatgcattttccacaatacgcaccccctgtaatggcctatcctgctactacaccaacaggcatgataggatatggaattcctccacaaatgggaagtgttcctgtaatgacgcaaccaaccttaatatacagccagcctgtcatgagacctccaaacccctttggccctgtatcaggagcacagatacagtttatgtaacttgatggaagaaaatggaattactccaaaaagacaagtgctcaagcagcaaaatccttacttccagcaaaatccaaactgctgtctcttaaatctcttaaactctcttcttccattagaatgctacaagtaactcagtgaaggcccatgaaggaaattgggactagtttataggagaacgtatcaatacagtttataaagccaagaattgctatgatttaagactaagatctgtctttttggtgactaacccttcaattctttcaactcctgttaatacccataatcagtaacctatcaagaaaagcccttatttggaaagtgtgaaatttgtatttggaaaagctgcctggagagaagaactgtgtcctttactgtatttcaacaggactcttttgggggatcaaaattaaaattcctaattatgcattatctttcttttctccagtcctcacaaatacagaaacaataactgaaattaacttttctttttttaaaaaaaattatattcagtttgcagtagacattccttaagtatttgtatttatttatgattatcaattttacataacattaatattgtatcagacctccttatgaaaatgagtatggatgtgcacagtatgtttgatttttatccacaagaatgaatctgattcagaatgcttttctcagctgacatacagagcactaaatattttaaggcaagtccataggtctgaatctcttaagaattctcggcctctgtgggatttagggaagcattataaatgcattaatccttatagtcaattctgtgcctaggattttgccagggaacagttcactgactaggaaaagcactacattttaaattcagcattagtgcattgggaaggatctttactgctttgtgcttggcatgtcattattttccatttgacattagggcctttccaaaatgaatgtgaggaattgctttcacttcaagactttccttcttttcactaaaactctagaaggtgttacaagggggagggaaggggggcaaagtccttgaacattttctttggctcgtgccatgttatgatcatataccttttaaataaggggaaatagtatctttaaagttaatgtctagccaagagtttagtaaacgaagaattaaactgcactgttgatcggtgctttgtgtaaatacatctttaacatttgggtggagaggggccttaagaaggacagttcattgtaggaaagcaattctgtacatgagtttaagcattcttgttgcattgtctctgcagattctatttttgtttacaatattaaaatgtatgttagcaaaatgggtggattttcaaataaaatgcagcttccacaaaagttttgttatggtattctggtctgagatgcattttcatttttcctttctctttttattatcaatattgtcatttttccctaataaaatatacccaggtgattatatttgttgatctaataacatggaaggtttgttttatatgaattttcaaaaagatgtctctttacactttttgttaccttgtagactcttattgataaatgcaactacttattaaaattgttcactttttgtcttttgaaaaaaaaaaaa

SEQ ID NO: 674 - DNA, 2472 bp, HOMO SAPIENS
gatctgacctggcagctattcctccttctctgaagagttcccatcagtagtcattacaactacctctcgcctcaaggctccatttttagctgctgctctgatttcagggcagccagtactctggccccttcagtcggggagtggaaggagatgtggggtgggggtgagaaaatgcttctgcctgttgttcttgaaggatagactatgggtgggcagagagaactgggggcagaaatggaattagatgtgattgggttatgcagtcaactagaggtctccttcccgccctctctccacacagagaggaacctctgctccttagctcttacagcaggactgtggcatctagtcacttcaatactagttcttgctcttcacagaggtagatttttctttaccctacagcactgttgggcatccctcccatcacatgggtctgtgggtgagatatgttatgctgttcctccctcgggaaggttggtattgaggggtgccttgctccagaggcgccagcccagcatctgtggtgagttggctaagatccagagtgacctgctcagagctccccagaggccttcactctttggggcagtctctctagggtcactttctgaatgtaccttctacctaaagtatacaaacacaaagagccagctgagctggttctagtgtgaaagccgtaagtgccacccagcaggcgtttgaaaacaagaaatcattcttctgtggaaggagaatgtgccatctcagctaccctcagtccgccagggagcccagtctgtgtattcatatgaagttgtgaaaaccatgagtgtgtgccatggccatcgtgtctacacacagccactattgttcctgtgggctagtctccagcaaattaaaacactggcatggcctaggaagggcgttgcgagctcctaaatggaaagcttctctgggggtagggagatgaagagccaagatgctggtgaagcaggtgcagtgaggatccaaggcaaggaattgccctgagggaggtggctgcatatggagaaaggcagttctctgtgggcaaggccagcttgcttcaggctgtagagggaatttggtctgaagcaacagggcatgaactgtgactttgagctgccaggttgtcttcatctcagaactttcctatcctggcactctcgttacctttcttctataccttggcctctgtaactgcagtccaaaacaagttacagctgccttaatccactgagattctctatgaggatgtacagaaaagttttcctgtaataattttgcttatatgctaactcttttcatgttagcaaagaatattctatgaattagaatgttactgtggtagatctaaaggagaatgaacagaaggtgctggaggacctgttaaacaatctctggctattaaaaaacatcaagatgagaattaaaggcatatcctgatatacttgcctgcttgcacatgaggctgggagatcccatgcctgttgaagttaactctagccctgacctctattgatcttttgggaatgagggctgatttgaaggtgctgttgcaggatttcatttagctgctgccagttcaagtgacctgtccccagggcttttaaagtggaccctgggctgtggagcaaagtgactatccatttggacttttggataatgtggcaggagtcccagctgtttaatttctagtcacattttccagaaagttgttctaagttgagattactgacaagatttctcaagggcaggaccagatatgtgagagacttctagttcagagctgacccctctaagcctctgacacttaaacacgagtcctgctgtccccagcacacaactgcactgaagccttgttcctctcggctggtgtagagctcatctgcatgttgtgtgcagataccagtagcctccctgcttgaataggcctctcctaggctaggcaggtgttcagaggcatgaaggtctgggcaggggaagggcgtcttctgaaatgggagttaccaggtttttaaatgctgctattgttttatttaccatttaaggtcttttctattatatctgagtaactagtcagtttttcttacagtgctcatagcagttgtatttgaattgtattttcagtgaaatttgttttacattgccatttaaaattggcctttaacagcttcccaactggcttatatttttttttaatgaaaacataacccatgaggctcagatgctgttgaagaaataaatggtatgttgctgctgacagtagtgcttgcctattgtaacagcattggttctgctgtagcctcggtgaccatttaagttgaataaatctgtcattttcacccacaaacagttgttgagcccctggatttgggttgtcactgtggttctcctgccagtgctataatccagtgtcgtaggtgcagggtatgaatcagctcagcctcttaggagagaggggctctcagc

SEQ ID NO: 675 - DNA, 1629 bp, HOMO SAPIENS
acacatcaggggcttgctcttgcaaaaccaaaccacaagacagacttgcaaaagaaggcatgcacagctcagcactgctctgttgcctggtcctcctgactggggtgagggccagcccaggccagggcacccagtctgagaacagctgcacccacttcccaggcaacctgcctaacatgcttcgagatctccgagatgccttcagcagagtgaagactttctttcaaatgaaggatcagctggacaacttgttgttaaaggagtccttgctggaggactttaagggttacctgggttgccaagccttgtctgagatgatccagttttacctggaggaggtgatgccccaagctgagaaccaagacccagacatcaaggcgcatgtgaactccctgggggagaacctgaagaccctcaggctgaggctacggcgctgtcatcgatttcttccctgtgaaaacaagagcaaggccgtggagcaggtgaagaatgcctttaataagctccaagagaaaggcatctacaaagccatgagtgagtttgacatcttcatcaactacatagaagcctacatgacaatgaagatacgaaactgagacatcagggtggcgactctatagactctaggacataaattagaggtctccaaaatcggatctggggctctgggatagctgacccagccccttgagaaaccttattgtacctctcttatagaatatttattacctctgatacctcaacccccatttctatttatttactgagcttctctgtgaacgatttagaaagaagcccaatattataatttttttcaatatttattattttcacctgtttttaagctgtttccatagggtgacacactatggtatttgagtgttttaagataaattataagttacataagggaggaaaaaaaatgttctttggggagccaacagaagcttccattccaagcctgaccacgctttctagctgttgagctgttttccctgacctccctctaatttatcttgtctctgggcttggggcttcctaactgctacaaatactcttaggaagagaaaccagggagcccctttgatgattaattcaccttccagtgtctcggagggattcccctaacctcattccccaaccacttcattcttgaaagctgtggccagcttgttatttataacaacctaaatttggttctaggccgggcgcggtggctcacgcctgtaatcccagcactttgggaggctgaggcgggtggatcacttgaggtcaggagttcctaaccagcctggtcaacatggtgaaaccccgtctctactaaaaatacaaaaattagccgggcatggtggcgcgcacctgtaatcccagctacttgggaggctgaggcaagagaattgcttgaacccaggagatggaagttgcagtgagctgatatcatgcccctgtactccagcctgggtgacagagcaagactctgtctcaaaaaataaaaataaaaataaatttggttctaatagaactcagttttaactagaatttattcaattcctctgggaatgttacattgtttgtctgtcttcatagcagattttaattttgaataaataaatgtatcttattcacatc

SEQ ID NO: 676 - DNA, 1727 bp, HOMO SAPIENS
ggggcgacggtggtggcggcggcggcagcgggttcggttgcgcgtggcgcacggggtgggagcggagcccaggccgggagcaggcgccgccgccacaggcgaccatggggaacgtgttggctgccagctcgccgcccgcagggccgccaccgccgcctgcgccggccctcgtggggctgccgccacctccgccctcgccgccgggcttcacgctgccgccgctgggaggcagcctgggcgccggcaccagtacgagtcgaagttcggaacggacccccggggctgcaaccgccagcgcctcaggggccgccgaggatggggcctgcggctgcctgcccaacccgggcacattcgaggagtgccaccggaagtgcaaggagctgtttcccattcagatggagggtgtcaagctcacagtcaacaaagggttgagtaaccattttcaggtcaaccacacagtagccctcagcacaatcggggagtccaactaccacttcggggtcacatatgtggggacaaagcagctgagtcccacagaggcgttccctgtactggtgggtgacatggacaacagtggcagtctcaacgctcaggtcattcaccagctgggccccggtctcaggtccaagatggccatccagacccagcagtcgaagtttgtgaactggcaggtggacggggagtatcggggctctgacttcacagcagccgtcaccctggggaacccagacgtcctcgtgggttcaggaatcctcgtagcccactacctccagagcatcacgccttgcctggccctgggtggagagctggtctaccaccggcggcctggagaggagggcactgtcatgtctctagctgggaaatacacattgaacaactggttggcaacggtaacgttgggccaggcgggcatgcacgcaacatactaccacaaagccagtgaccagctgcaggtgggtgtggagtttgaggccagcacaaggatgcaggacaccagcgtctccttcgggtaccagctggacctgcccaaggccaacctcctcttcaaaggctctgtggatagcaactggatcgtgggtgccacgctggagaagaagctcccacccctgcccctgacactggcccttggggccttcctgaatcaccgcaagaacaagtttcagtgtggctttggcctcaccatcggctgagccctcctggcccccgccttccacgcccttccgattccacctccacctccacctccccctgccacagaggggagacctgagcccccctcccttccctccccccttgggggtcgggggggacattggaaaggagggaccccgccaccccagcagctgaggaggggattctggaactgaatggcgcttcgggattctgagtagcaggggcagcatgcccagtgggcctggggtcccgggagggattccggaattgaggggcacgcaggattctgagcaccaggggcagaggcggccagacaacctcagggaggagtgtcctggcgtccccatcctccaaagggcctgggcccgccccgagggggcagcgagaggagcttccccatccccggtcagtccaccctgccccgtccactttcccatctcctcggtataaatcatgtttataagttatggaagaaccgggacattttacagaaaaaaaacaaaaaacaacaaaaaatatacgtgggaaaaaaaacgaaaaaaaaaaaaaaaaaa

SEQ ID NO: 677 - DNA, 3095 bp, HOMO SAPIENS
caggagattgcctgctctctgaaaaaccaggaggagctggtagggaaggactggggcgtggaacagggcctcagcttgtttctcgccagttggaatcatatacagccaccactgggagggagccttggagattacctagtgaccaggggctcttatttaatcaagaggcattgcacatgcagttactttattgacgtagtgtttgcactacttcaatagtgcaaagggaggaagggaggaaggagaaaccaccctaatgcccgtgagagggtgatgtggggatgataggataaacctattcatggtgagcctccccacagactgttatgcaaccattagaaggaatgagtgagttctgtccctgctgacctggatgtgggatcacgtgttctgccaagtaagaccagtaagatttagagatgcgttcggagcaggggtggcgtggatgacaggtgacgaactgccgattaaatctggccctctgcctggctttgtacagcccgtggctaagaatggtttttacatttttaaattttggaaaaaaatcaaaaaaaggagatttttatgacacgtgaaaatgatatgaaatttacatttcagtgttcattactgaagttttgttggagtgcagccacgctcttctgtcggcacgtcatctgcatagctgcattcgcactgcaaaggcagagccgagccgtcacaggctgtgaggcagaacgtgtttattacctgacccttttctgaaaaagtttgtcggccaccgccttagagtatgatgacattttgccaaacagcagcaccagatatggttctcagcacttcagaggagtagattcattacatttgtttattcgttcattcattttatcctttattcgtcagatgcttactgtctatctgtggggccaggcaccaggaaccagcagagaacaaacagatgcaggccttcttcttgtggagctgaaagtctgtgtctagatccttcttttctcagtacaagcacttccagcctttccaactctttctcacgagtctcagtgtccagccccttgcatcctgcctcccttctgcctccccagtatgtatcctgattgcccaagtccctcccaaaaagaggtatccaaactggtcccatacttcctggggtcttgccaagaggttgagatctagtagaaggacacatcttgaattgggtcatgctttctatctggtttcaaggtgcttaacatccaacctttgccttttcagctcctgccctccactgactccagagagggagatccccagtacttgactccatcacgcagatgggagcaggcaccagctatggagagggatacagctgcgtctccacatgacccatcctgcatgacaccaaagccaccgccagacagtgcctcggattctatgcaaaacctgggaagcggagacctaccccagccccgggaggaagctagctcttcaggggaccgtctgaggactggagtttgatccatgaacctggcttcgaggccttgcttttctctcttcttcattcatattcattcccaacaccttagaaggtgttgcttaatttatttctagaaaagcagcccagagtcagtcattgaagccttccccaccccctggccaaaaaaaaaaaaaaaaaaaaactggacacattttggatctgttgggagcttggagtccagtggttggcatagttgtcacattgggagcagagaagaagcaaccaggggccctgatcaggggactgagccgtagagtcccaggatggcacccaatggcacagcctcttccttttgcctggactctaccgcatgcaagatcaccatcaccgtggtccttgcggtcctcatcctcatcaccgttgctggcaatgtggtcgtctgtctggccgtgggcttgaaccgccggctccgcaacctgaccaattgtttcatcgtgtccttggctatcactgacctgctcctcggcctcctggtgctgcccttctctgccatctaccagctgtcctgcaagtggagctttggcaaggtcttctgcaatatctacaccagcctggatgtgatgctctgcacagcctccattcttaacctcttcatgatcagcctcgaccggtactgcgctgtcatggacccactgcggtaccctgtgctggtcaccccagttcgggtcgccatctctctggtcttaatttgggtcatctccattaccctgtcctttctgtctatccacctggggtggaacagcaggaacgagaccagcaagggcaatcataccacctctaagtgcaaagtccaggtcaatgaagtgtacgggctggtggatgggctggtcaccttctacctcccgctactgatcatgtgcatcacctactaccgcatcttcaaggtcgcccgggatcaggccaagaggatcaatcacattagctcctggaaggcagccaccatcagggagcacaaagccacagtgacactggccgccgtcatgggggccttcatcatctgctggtttccctacttcaccgcgtttgtgtaccgtgggctgagaggggatgatgccatcaatgaggtgttagaagccatcgttctgtggctgggctatgccaactcagccctgaaccccatcctgtatgctgcgctgaacagagacttccgcaccgggtaccaacagctcttctgctgcaggctggccaaccgcaactcccacaaaacttctctgaggtccaacgcctctcagctgtccaggacccaaagccgagaacccaggcaacaggaagagaaacccctgaagctccaggtgtggagtgggacagaagtcacggccccccagggagccacagacaggtaatagccctagccattggtgcacaggatgggggcaatgggaggggatgctactgatgggaatgattaagggagctgctgtttaggtggtgctggtttatgttctaggaactcttcatgagcactttgtaaacaccctcttgcttaatcctcccaacggcccccaaaggtagaacttagctcccttttaaaaggagcacattaaaattctcagaggacttggcaagggccgcacagctggggcct

SEQ ID NO: 678 - DNA, 2546 bp, HOMO SAPIENS
ttcctttccagcctcacgcccgtgggctgcagttggaacgatggcggcggcagctgccgccgggcctagcccggggtctggacctggggactccccagaagggcccgagggggaggctccggagcgtcggcggaaggcgcacgggatgctgaagctttactacggcctctcggaaggggaggcggcgggacgccccgcggggcccgaccccctggacccgactgatctgaacggggcgcacttcgacccggaagtttacctagacaagctgcgtagagagtgccctctggcccagttgatggacagtgagacggacatggtgcggcagatccgggctctagacagcgacatgcagaccctggtctatgagaactacaacaagttcatctcagccacagacaccatccggaagatgaagaacgatttccggaagatggaggatgagatggaccggctggccaccaacatggcagtgatcaccgacttcagcgctcgcatcagcgccacgctgcaggaccgccacgagcgcatcaccaagctggcaggggtccacgcgctgctgcggaagctgcagttcctctttgagctgccctcgcgcctcaccaagtgcgtggaactgggcgcctatgggcaggcggtgcgctaccagggccgcgcgcaggccgtgctgcagcagtaccaacacctgccctcgttccgcgccatccaggacgactgccaggtcatcacggcccgcctggcccagcagctgcggcagcgctttagggagggcggctcaggcgccccggagcaggcagagtgcgtggagctgctgctggccctgggcgagcctgcggaggagctgtgcgaggagttcctggcgcacgcccgcggccggctggagaaggagctgagaaacctggaggccgagctggggccctcacctccggctcccgacgtgttagagttcaccgaccatggaggcagtggcttcgtgggcggcctctgccaggtggcggcggcctaccaggagctgtttgcggcccagggcccagcaggtgccgagaagctggcggccttcgcccggcagctgggcagccgctattttgcgctggtggagcggcggctggcgcaggagcagggtggtggtgacaactcactgctggtgcgggcgctggaccgcttccaccggcgcttgcgggctcccggggccctgctggccgctgccgggctcgcagacgctgccacggagatcgtggaacgagtggcccgcgagcgcctgggccaccacctgcagggtctccgggcggccttcctgggctgcctgacagacgtccgccaggcgctggcagcacctcgcgtggctgggaaggagggccctggcctggccgagttgctggccaatgtggccagctccatcctgagccacattaaggcctctctggcagcagtgcaccttttcaccgccaaagaggtgtccttctccaacaagccctacttccggggtgagttctgcagtcagggtgtccgtgagggcctcatcgtgggcttcgtccactctatgtgccagacggctcagagcttctgcgacagccctggggagaaggggggtgccacaccacctgccctgctcctgctgctctcccgcctctgcctggactacgagacggccaccatctcctacatcctcactctcactgatgaacagtttctggtgcaggatcagttcccagtgacgcccgtgagcacgctgtgtgcagaggccagggaaacggcgcggcggctgctgacccactacgtgaaggtgcagggcctggtcatatcacagatgctgcgcaagagcgtggagactcgcgactggctcagcactctggagccccggaatgtgcgggccgtcatgaagcgggtggtggaggataccaccgccatcgacgtgcaggtggggctcctgtacgaagagggtgttcgcaaggcccagagcagcgactccagcaagaggactttctccgtgtacagcagctctcggcagcagggccgctacgcccccagctatacccccagtgccccgatggacaccaacctcttgagcaatatccagaagctattctctgaacgtattgatgtgttcagccctgtggagttcaacaaggtgtcggtgctgaccggcatcatcaagatcagcctgaagacgctgctggagtgtgtgcggctgcgcacctttgggcgcttcgggctgcagcaggtgcaagtggactgccactttctgcagctctacctgtggcgttttgtggccgacgaagaactcgtgcacttgctgctggacgaagtggtggcctctgctgccctgcgctgcccagaccctgtgcccatggagcccagtgtggttgaggtcatctgcgagcgcggctaggcgcagccgctgccatgcaccggtctgtccctgcaccccatggcacccaggatctggtctcggtggtccttccccgcaggcaggtgtcaggaccggcctaataaacatgtgtggcctcctcaaaaaaaaaaaaaaaaaaaaaaaaaaaaaaaaaaaa

SEQ ID NO: 679 - DNA, 2816 bp, HOMO SAPIENS
cacgcactacgggttggcgccagagtcaaaaggcgtcggccctctggcaagatggctgctgcggaggcgttggagcgcggaaatctggaaccgggatggcgacgtctacactgagtcggaggcgaaggagcttactccacgggaacagcctctagataatctgagttgttgaaaatacgaagcctgttactcgtgaacagtggctgacaacagtgttgttgtgagcctggctgtctgcttggacccagaggtttcgtctgccagggtttttggttgtatttaggatttcagggaaaagtgtccaagctttcagtgttggagcaggtatggacgacaaaggcgacccgagcaatgaggaggcacctaaggccatcaaacccaccagcaaagagttcaggaaaacatggggttttcgaaggaccactatcgccaagcgagagggcgcaggggacgcggaggctgacccactggagccgccacccccacagcagcagctgggcctgtccctgcggcgcagtgggaggcagcccaagcgcactgagcgcgtggagcagttcctgaccattgcgcggcgccgcggcaggaggagcatgcctgtctccctggaggattctggtgagcccacgtcctgccccgccacagacgccgagacagcctccgagggcagcgtggaaagcgcttctgagaccagaagcggcccccagtctgcttccacagctgtgaaggaacgaccagcctcttctgaaaaggtgaaaggaggggatgaccacgatgacacctccgatagtgacagcgatggcctgaccttgaaagagcttcagaatcgccttcgcaggaagcgggaacaggagcccactgagaggcccctgaaagggatccagagtcgcctgcggaagaagcgccgggaggagggtcccgccgagactgtgggctccgaggccagtgacactgtggagggcgtcctgcccagtaagcaggagcccgagaacgatcagggggttgtgtcccaggctgggaaagatgacagagagagtaagttggagggaaaggcggctcaggacatcaaagatgaggagcctggagacttgggccgaccgaagcctgaatgtgagggttacgaccccaacgccctgtattgcatttgccgccagcctcacaacaacaggtttatgatttgctgtgaccgctgtgaagaatggtttcatggcgattgtgtgggcatttctgaggctcgagggaggcttttggaaaggaatggggaagactatatctgcccaaactgcaccattctgcaagtgcaggatgagactcattcagaaacggcagatcagcaggaagctaaatggagacctggagatgctgatggcaccgattgtacaagtataggaacaatagagcagaagtctagcgaagaccaagggataaagggtagaattgagaaagctgcaaatccaagtggcaagaagaaactcaagatcttccagcctgtgatagaggcgcctggtgcctcaaaatgtattggccccgggtgctgtcacgtggcgcagcccgactcggtgtactgcagtaatgactgtatcctcaaacacgccgcagcgacaatgaagtttctaagctcaggtaaagaacagaagccaaagcctaaagaaaagatgaagatgaagccagagaagcccagtcttccgaaatgcggtgctcaggcaggtattaaaatctcttctgtgcacaagagaccagctccagaaaaaaaagagaccacagtgaagaaggcagtggtggtccctgcgcggagtgaagcactcgggaaggaagcagcttgtgagagcagcacgccgtcgtgggcgagcgatcacaattacaatgcagtaaagccagaaaagactgctgctccctcgccgtcactgttgtataaatgtatgtatcacctaggggttggcctcctggacccctcccgttctttctggatagccatcccctgggcctgtccaggactgggagttgcagctttgtgttaagctgatcacagacaccggctgcaccatcagcgggaagcagagcccatgtccaggatgcctcctgctgccctgtgtccatccctagtctgtcaggacttcctgtcactgttttccaaagctgtaaacctcactggtgaacgttcaccttaatgattgattctttaatctctgttttcactctcaggctctggtaagtattcgtattctcttcatcccagtctgattgcatagccacactgcccggcacgccacatccacccctgtctgcacatgagttgttctgacaacagcgctgtatacgcttcagtttttccacattgtccacggccagcacatgaaagcatcacttcttttttatgttgtgggaatctttgcaagttagtgttgcatctgattttcaggtgtacatttatttttgactgggcagataggggatttttttttttccatgtccgattcacacgctacacacccacatgaacacattcgaacttcgaaggccacacactcctgcttcataggccccacggtaagtgagttcacacctagaacactgtcctgaccgcaggacgcgtgccttggacttggtattctacatgtgactggctttcttgccctcgtctcttgaatgtttagactcttaagatcatatcctgccccaaatttcaaattaatgaaatgaagatatttcaaacagatctttgaaacctcagattctgtggtgcaattttaatgttttcttgtttctcagttttctgctataaaactattttcaattcagtcaaaaaaaaaaaaaaaaaa

SEQ ID NO: 680 - DNA, 966 bp, HOMO SAPIENS
ggccgttggttggtgcgcggctgaagggtgtggcgcgagcagcgtcgttggttggccggcggcgggccgggacgggcatggccctgctgctgtgcctggtgtgcctgacggcggcgctggcccacggctgtctgcactgccacagcaacttctccaagaagttctccttctaccgccaccatgtgaacttcaagtcctggtgggtgggcgacatccccgtgtcaggggcgctgctcaccgactggagcgacgacacgatgaaggagctgcacctggccatccccgccaagatcacccgggagaagctggaccaagtggcgacagcagtgtaccagatgatggatcagctgtaccaggggaagatgtacttccccgggtatttccccaacgagctgcgaaacatcttccgggagcaggtgcacctcatccagaacgccatcatcgaaagccgcatcgactgtcagcaccgctgtggcatcttccagtacgagaccatctcctgcaacaactgcacagactcgcacgtcgcctgctttggctataactgcgagtcctcggcgcagtggaagtcagctgtccagggcctcctgaactacataaataactggcacaaacaggacacgagcatgagcctggtatcgccagccttaaggtgtctggagcccccacacttggccaacctgaccttggaagatgctgctgagtgtctcaagcagcactgacagcagctgggcctgccccagggcaacgtgggggcggagactcagctggacagcccctgcctgtcactctggagctgggctgctgctgcctcaggaccccctctccgaccccggacagagctgagctggccagggccaggagggcgggagggagggaatgggggtgggctgtgcgcagcatcagcgcctgggcaggtccgcagagctgcgggatgtgattaaagtccctgatgtttctcaaaaa

SEQ ID NO: 681 - DNA, 8843 bp, HOMO SAPIENS
agcagacttgggtggctctgcgccgcggaggccacagccgcagacttccccagtagtaccgcgccgctccgccccggagtgacgccctccgcccatgggcctggccgagggcaaccggcgggcggcgcggaggaggcggcgacaggtggcgcgcagcagggccggagccgggccgggccatggccgcctcggagcggctgtacgagttgtggctgctctactacgcgcagaaggacctgggttacctgcagcagtggctgaaggcctttgtaggtgccttcaagaagagcatctcactgtcctctctggagccacgaaggccagaggaggcaggtgcagaggtcccgctgctaccactggatgagctgcatgtgctggccgaacagctgcaccaggctgacctggagcaagccctcctgctgctcaagctcttcatcattctctgcaggaacctggagaacatagaggcaggccggggccaagtgctagtgccccgagtgctggcactgttgaccaagttggtggcggagctgaaaggatgcccaccaccccagggccgaggcacgcagttggagaatgtggccctacatgctctgcttctctgcgagggcctctttgacccttaccaaacctggcggcgccagcgcagtggggaagtcatcagctccaaggagaagagcaaatacaagttccctcctgctgctttgccccaggaattcagcgccttcttccaagagagcctacagaatgcagaccacttgcctcccatactgctgttacgtctcatccacctcttctgcgccgtcctcgctggaggaaaggagaacgggcagatggctgtaagtgatggctctgtgaagggcctgctgagtgtggtgcggggctggagccgtgggccagccccggacccgtgcctagtgccactggctctagaggcactggtaggtgcagtccatgtcttgcatgccagccgcgcacctcctcgtggcccagagcttcgtgccctgcttgagagctacttccatgtccttaatgctgactggccagctggtctgagctcaggccccgaagaggcccttgtcaccctccgggtcagcatgctcgacgccatccccatgatgctggcatgtgaagaccggccagtgctgcaagccaccttcctcagcaacaattgctttgaacacctcactcggctcattcagaacagcaagctgtacctgcagtcccgggcgccccccgagggggacagtgacctggctacccggttactgactgagcccgatgtccaaaaggtcctggaccaagacacagacgccattgcagtccatgtagtcagagtgctgacctgcatcatgagtgactccccctcggccaaggaggtgtttaaggagcgcatcggctaccctcacctgcaggaggttctgcagagccatggtccccccacccatcggctgttgcaagagctgctcaacatggctgtggagggtgaccacagcatgtgcccacctccaccaatccgcaacgagcagccggtactggtgctggcgcagtggctgccgtcattgcccaccgctgagctgcggctcttcctagcgcaacgcctcaggtggctctgtgacagctgccctgccagccgtgccacctgtgtgcaggcaggcctggtgggctgcctgttggagacactcagcacagggctagccctggaggcccgctgccaagagcagctgctggcactgctacaagcactgggccgtgtatcaataaggcccatggagctgcgtcacctgctgcgcccccggccaggattggactcggaaccaggcggagctgaggctggaaaggcccgacacgcaggtgctgtcatccgcacattatcaggcatggccaggcaccagggtcctgcacgtgctctgcgctactttgacctcacgcccagcatggcgggcatcatggtaccccctgtacagcgatggccagggcctggcttcacctttcatgcctggctctgtctgcaccctatggatacagcacctacccctgcccccacccgaccactccagcgaaagcagctgtacagcttctttaccagcagcggctcagggtttgaggccttcttcacggcggccgggaccctggtggtggctgtgtgcacacggaaggagtatttgaccatgagtttgcccgaagtgtcctttgccgactctgcctggcactgcgtggctatcgtccatgtgcctgggcgccggcccttcagccagaacctggtccatgtctacaaagacggccatctggtcaagacagcaccccttcgctgcccctccctcagtgagcctttctcctcctgctgtatcggctccgctggataccgcacaacgaccaccaccacagggctgcccacaccaccagtccccgccaccctggcctacactcaccccgccctcacccgctcccagtcagtcccagcctccacagggcttggctgggggtccgggctggtggcccccctgcaggagggcagcatcgactctaccctcgcaggcacccaggacactcggtggggcagccccacatccctggagggtgagctgggggctgtggccatctttcacgaagccctgcaggcgacggctctgaggaccctgtgcaccctggggcccaatgagacggcacccttcaagcctgagggggagctgcatgagctcagcaccaggctgctcctccattactcacctcaggcttgtaagaacaacatctgcctggacctgtcccccagtcatgggcttgatgggcgcctgacgggccacagagtggagacctgggatgtgaaggatgtggtgaactgcgttgggggtatgggtgccctgctgcccctgctggagcgagtagctgcacagcccaaagaggctgaagcaggtccagctgaaacgcatgacctcgtgggtcctgaactgacctctggtcacaacacccagggcctggttctcccattgggtaaatcttcagaggaacggatggagaggaacgcagtggctgcttttctgctgatgctgcggaacttccttcagggtcacatggtgaaccaagagagcctggtgcagtgccaggggcctgccatcatcggggccctcctgcgaaaggtcccaagctgggccatggacatgaacgtgctcatgtccgcccagctgctgatggagcaggtggcagctgagggcagcgggcccctcctgtacctactctaccagcatttgctcttcaactttcacctctggaccctcagtgacttcgccgtgcgcctcggtcacatccagtacatgtccagcatagttcgggagcacagacagaagctgcggaagaagtacggcgtccagtttatcttggatgctctgcgcacccactacagcccgcagcgggagcgccccctggctgctgacgacctacgcaccgtgcagacctccctcctgggcctggcgagggagttcctggtgcggagtctctcagcagatgacgtgcaggtcacgcagaccatgctgagctttttggcggccacaggcgatgacggtcaggcggtgggtgcgctggacctgctgctggccctgctgcacggttccctggtgcaggagtccttggctgtctttctgttggagccagggaacctcgaagtgctactggccctgctagtgcggccagggtcactgcccctgctgcccgatcgagtctgcaagatcctgcgcagactgcagcagaatgagcggctacctgagcggagccgccagcgcctccggctgcgggagtgtggtctccagggtctggttgcctgcttgcctgaggggactgtttccccccagctctgccagggcctctacaagctgttcctgggggcagattgcctgaacctctcagatctgctggctgtggtacagctgtccctccaggctgacctcagcgttcgcctagacatctgtcgccagcttttccacctcatctacggacagccagatgtagtgcggcttctggcccgacaggctggctggcaagatgtgctgacccggctatatgtcctggaggctgccacagccggcagcccccctccgtcttccccagagtcacctacctcccccaagccagccccacccaagccacccactgagtcacctgctgagccttcagatgtcttcctgccctcagaggccccctgccctgaccctgatggcttttaccatgctctctccccattctgcacgccctttgacctgggcctggaacggtctagtgtaggatcaggcaacactgctggtggtggcggcagcagtgggactcttactccagccagccagcccggcactccttcgccactggatgggccgcggccctttcctgctgctcctggccgccacagctccagtctctccaatgtgctggaggacggcagcctcccggagcccaccattagcggggatgatacctcgaacaccagcaacccacagcaaacctctgaggaagagttgtgcaatctgctcaccaacgtgctgttctcggtgacgtggcgtggcgtggaaggcagcgatgaggctgcctggcgggagcgtggccaggttttctcagtgctcacccagctgggggcctcagccacacttgtgcgcccaccagactgcatcaagcgcagcctcctggagatgatgctggagtcagccctgaccgacatcaaagaggcccccgtgggggtcctggccagcctcacccagcaagcgctttggctgctgcgtctgctgcaggacttcctgtgtgctgaaggccatggtaaccaggaactgtggagtgagaagctctttgaaggtgtatgcagcctacttgatcgcctgggagcctggccccacctggccaacggcacagctgatctccgtgagatggcgcagattggcctacggcttgtacttggctacatcctgctggaagacccacagctgcatgcccaggcctacgtgagattgcacatgctgctacagactgcagtgccagcccgccgcgaggaggcctgctatgtgctctccaagctggaggctgcactggggcgggtgctgaacacctcttccttggagtcagccactgatgaggcagggtccccacttgcagctgcagcagctgcagcagctgcagagcgctgctcctggctggtgccactggtgcgcacgctgctagaccgtgcctatgagccgctggggctgcagtggggactgccctccctgccacccaccaatggcagccccaccttctttgaagacttccaggctttttgtgccacacccgaatggcgccacttcatcgacaaacaggtacagccaaccatgtcccagttcgaaatggacacgtatgctaagagccacgaccttatgtcaggtttctggaatgcctgctatgacatgcttatgagcagtgggcagcggcgccagtgggagcgcgcccagagtcgtcgggccttccaggagctggtgctggaacctgcgcagaggcgggcgcgcctggaggggctacgctacacggcagtgctgaagcagcaggcaacgcagcactccatggccctgctgcactggggggcgctgtggcgccagctcgccagcccatgtggggcctgggcgctgagggacactcccatcccccgctggaaactgtccagcgccgagacatattcacgcatgcgtctgaagctggtgcccaaccatcacttcgaccctcacctggaagccagcgctctccgagacaatctgggtgaggttcccctgacacccaccgaggaggcctcactgcctctggcagtgaccaaagaggccaaagtgagcaccccacccgagttgctgcaggaggaccagctcggcgaggacgagctggctgagctggagaccccgatggaggcagcagaactggatgagcagcgtgagaagctggtgctgtcggccgagtgccagctggtgacggtagtggccgtggtcccagggctgctggaggtcaccacacagaatgtatacttctacgatggcagcactgagcgcgtggaaaccgaggagggcatcggctatgatttccggcgcccactggcccagctgcgtgaggtccacctgcggcgtttcaacctgcgccgttcagcacttgagctcttctttatcgatcaggccaactacttcctcaacttcccatgcaaggtgggcacgaccccagtctcatctcctagccagactcccagaccccagcctggccccatcccaccccatacccaggtacggaaccaggtgtactcgtggctcctgcgcctacggcccccctctcaaggctacctaagcagccgctccccccaggagatgctgcgtgcctcaggccttacccagaaatgggtacagcgtgagatatccaacttcgagtacttgatgcaactcaacaccattgcggggcggacctacaatgacctgtctcagtaccctgtgttcccctgggtcctgcaggactacgtgtccccaaccctggacctcagcaacccagccgtcttccgggacctgtctaagcccatcggtgtggtgaaccccaagcatgcccagctcgtgagggagaagtatgaaagctttgaggacccagcagggaccattgacaagttccactatggcacccactactccaatgcagcaggcgtgatgcactacctcatccgcgtggagcccttcacctccctgcacgtccagctgcaaagtggccgctttgactgctccgaccggcagttccactcggtggcggcagcctggcaggcacgcctggagagccctgccgatgtgaaggagctcatcccggaattcttctactttcctgacttcctggagaaccagaacggttttgacctgggctgtctccagctgaccaacgagaaggtaggcgatgtggtgctacccccgtgggccagctctcctgaggacttcatccagcagcaccgccaggctctggagtcggagtatgtgtctgcacacctacacgagtggatcgacctcatctttggctacaagcagcgggggccagccgccgaggaggccctcaatgtcttctattactgcacctatgagggggctgtagacctggaccatgtgacagatgagcgggaacggaaggctctggagggcattatcagcaactttgggcagactccctgtcagctgctgaaggagccacatccaactcggctctcagctgaggaagcagcccatcgccttgcacgcctggacactaactcacctagcatcttccagcacctggacgaactcaaggcattcttcgcagaggttgtcagtgatggtgtacccctggtgctagccctggtcccccaccggcagccccactccttcatcacccagggttccccagacctgttggtgactgtgagtgccagtgggctgctgggcacccacagctggttgccctatgaccgcaacataagcaactacttcagcttcagcaaagaccccaccatgggcagccacaagacgcagcgactgctgagtggcccgtgggtgccaggcagtggtgtgagtggacaagcactggcagtggccccggatggaaagctgctattcagcggtggccactgggatggcagcctgcgggtgactgcactaccccgtggcaagctgttgagccagctcagctgccaccttgatgtagtaacctgccttgcactggacacctgtggcatctacctcatctcaggctcccgggacaccacgtgcatggtgtggcggctcctgcatcagggtggtctgtcagtaggcctggcaccaaagcctgtgcaggtcctgtatgggcatggggctgcagtgagctgtgtggccatcagcactgaacttgacatggctgtgtctggatctgaggatggaactgtgatcatacacactgtacgccgcggacagtttgtagcggcactacggcctctgggtgccacattccctggacctattttccacctggcattggggtccgaaggccagattgtggtacagagctcagcgtgggaacgtcctggggcccaggtcacctactccttgcacctgtattcagtcaatgggaagttgcgggcttcactgcccctggcagagcagcctacagccctgacggtgacagaggactttgtgttgctgggcaccgcccagtgcgccctgcacatcctccaactaaacacactgctcccggccgcgcctcccttgcccatgaaggtggccatccgcagcgtggccgtgaccaaggagcgcagccacgtgctggtgggcctggaggatggcaagctcatcgtggtggtcgcggggcagccctctgaggtgcgcagcagccagttcgcgcggaagctgtggcggtcctcgcggcgcatctcccaggtgtcctcgggagagacggaatacaaccctactgaggcgcgctgaacctggccagtccggctgctcgggccccgcccccggcaggcctggcccgggaggccccgcccagaagtcggcgggaacaccccggggtgggcagcccaggggggtgagcggggcccaccctgcccagctcagggattggcgggcgatgttaccccctcagggattggcgggcggaagtcccgcccctcgccggctgaggggccgccctgagggccagcactggcgtctgcggccgcagcagcactttttgcacagtctggggcggggttccccggcttccaagtcgctgtttcgtcaaagcacgagggccgcctgtggccttaattcctaacggcggccccggttctcccttctcggcaataaaccaggcctagttttgtagcaaaaaaaaaaaaaaaa

SEQ ID NO: 682 - DNA, 2638 bp, HOMO SAPIENS
agtccctttttcttgagagagtgtggctctgtcaccaaggctggagtgcaggggcacaatctcagctcactgcaacctccaccttgcgtgtctcagcctcctgagcagctgggaccacaggagtgtgccaccacacccagctaatttttgtatttttttagtagagatggggtgtcaccatgttggccaggctggtctcaaactctcggcctcagcctcccaaagtgctgggattataggtgtgagccaccacacccagcctctatatcccttttatcggtggacccaacaatcttctgtagacagaagactgtgtgaataagccaatggtcccaagagagcacgcatcctaatgagaacggagacagataataaagagggaaacaagtaaaccaactatcaatgattaggagcgtcagatagagccaggtgcagcctggacaacatgatgagatccccatctctaaaaatataaaataaattagctggtcatgatggtgcacacctgtagccccagcttctcagtaggctgaggtgggaggattgcttaagcctgggaggtcaagcctacagtgagccatgatctcaccatgcactccagcctagacaacagggcaaggccctctaaaaaaaaaaatgaaaagatagcatgctttggccggatgtggtggctcacgcctgtaatcccagcacttcaggaggttgaggcgggcagatcacctgaggtcaggagtacgagatcagcctggccaacacggtgaaaccccatctctactaaaaatacaaaattaactgggcgtggtggctcatgcctgtaatcccagctactctggaggctgaggcaggagaatcgcttgaacccaggaggcggaggttgtggtgagctgagattgcgccattgcactccagcctgggcaacaagagcgaaactccgtctcaaaaaaggatagcatgcttcataaacggtgaaatgacatgcaaaggccatagttgtcaagcaccagtaacaccagagagtggcctgtctttccttcaagcagaccagagaggaccgttctgctggacgcctacagtgaacatctggcagcggccctgtgcaccaatccaaacctgatagagctgtctctgtaccgaaatgccctgggcagccggggggtgaagctgctctgtcaaggactcagacaccccaactgcaaacttcagaacctgagcactttgggaggcccagatggggaggatcacttgacccaggagttcaagaccagcctggccaacatggtgaaaccccatctctactaaaaataccaaaatgagccaggcatggtggcacacgtctgtaagcccagctactcaggaggccaaggcaggaggattgcttcaacccaggaggcagaggttgtggctgaagaggtgccgcatctccagctcagcctgcgaggacctctctgcagctctcatagccaataagaatttgacaaggatggatctcagtggcaacggcgttggattcccaggcatgatgctgctttgcgagggcctgcggcatccccaatgcaggctgcagatgattcagttgaggaagtgtcagctggagtccggggcttgtcaggagatggcttctgtgctcggcaccaacccacatctggttgagttggacctgacaggaaatgcactggaggatttgggcctgaggttactatgccagggactgaggcacccagtctgcagactacggactttgtggctgaagatctgccgcctcactgctgctgcctgtgacgagctggcctcaactctcagtgtgaaccagagcctgagagagctggacctgagcctgaatgagctgggggacctcggggtgctgctgctgtgtgagggcctcaggcatcccacgtgcaagctccagaccctgcggctggatagctgtggcctcacagccaaggcttgtgagaatctttacttcaccctggggatcaaccagaccttgaccgacctttacctgaccaacaacgccctaggggacacaggtgtccgactgctttgcaagcggctgagccatcctggctgcaaactccgagtcctctggttatttgggatggacctgaataaaatgacccacagtaggttggcagcgcttcgagtaacaaaaccttatttggacattggctgctgaatggtcctatctgctggctctcccctgagatctggacagaggaagatgggagggtgctcatcacccccccagcataatgatcagcctccttcctagagacagactcatgcagattgagatcaaaagtccctctgcttgggatcaaattaatgtttgacagagctggccaggcgtggtggctcatgtatgtaatcctagcacttcgagaggccgaggcaggtggatcacgaggtcaggagtttgagattagcctggccaagatggtgaaaccctgtctctactaaaaataaaaaaaaattagccaggcatggtggcgggcacctgtagtcccagctactcaggaggctgaggcaggagaatcgcttgaacccgggaggtggaggttgcagtgagccgagatcgcgccactgcactccagcctgggcgacagagtgggactccatctcaaaaaaaaaaaaaaaaaaa

SEQ ID NO: 683 - DNA, 3138 bp, HOMO SAPIENS
ggcgtggtcccgggacccgccccgccggggcttttgggagcgcgggcagcgagcgcactcggcggacgcaagggcggcggggagcacacggagcactgcaggcgccgggttgggacagcgtcttcgctgctgctggatagtcgtgttttcggggatcgaggatactcaccagaaaccgaaaatgccgaaaccaatcaatgtccgagttaccaccatggatgcagagctggagtttgcaatccagccaaatacaactggaaaacagctttttgatcaggtggtaaagactatcggcctccgggaagtgtggtactttggcctccactatgtggataataaaggatttcctacctggctgaagctggataagaaggtgtctgcccaggaggtcaggaaggagaatcccctccagttcaagttccgggccaagttctaccctgaagatgtggctgaggagctcatccaggacatcacccagaaacttttcttcctccaagtgaaggaaggaatccttagcgatgagatctactgcccccctgagactgccgtgctcttggggtcctacgctgtgcaggccaagtttggggactacaacaaagaagtgcacaagtctgggtacctcagctctgagcggctgatccctcaaagagtgatggaccagcacaaacttaccagggaccagtgggaggaccggatccaggtgtggcatgcggaacaccgtgggatgctcaaagataatgctatgttggaatacctgaagattgctcaggacctggaaatgtatggaatcaactatttcgagataaaaaacaagaaaggaacagacctttggcttggagttgatgcccttggactgaatatttatgagaaagatgataagttaaccccaaagattggctttccttggagtgaaatcaggaacatctctttcaatgacaaaaagtttgtcattaaacccatcgacaagaaggcacctgactttgtgttttatgccccacgtctgagaatcaacaagcggatcctgcagctctgcatgggcaaccatgagttgtatatgcgccgcaggaagcctgacaccatcgaggtgcagcagatgaaggcccaggcccgggaggagaagcatcagaagcagctggagcggcaacagctggaaacagagaagaaaaggagagaaaccgtggagagagagaaagagcagatgatgcgcgagaaggaggagttgatgctgcggctgcaggactatgaggagaagacaaagaaggcagagagagagctctcggagcagattcagagggccctgcagctggaggaggagaggaagcgggcacaggaggaggccgagcgcctagaggctgaccgtatggctgcactgcgggctaaggaggagctggagagacaggcggtggatcagataaagagccaggagcagctggctgcggagcttgcagaatacactgccaagattgccctcctggaagaggcgcggaggcgcaaggaggatgaagttgaagagtggcagcacagggccaaagaagcccaggatgacctggtgaagaccaaggaggagctgcacctggtgatgacagcacccccgcccccaccaccccccgtgtacgagccggtgagctaccatgtccaggagagcttgcaggatgagggcgcagagcccacgggctacagcgcggagctgtctagtgagggcatccgggatgaccgcaatgaggagaagcgcatcactgaggcagagaagaacgagcgtgtgcagcggcagctgctgacgctgagcagcgagctgtcccaggcccgagatgagaataagaggacccacaatgacatcatccacaacgagaacatgaggcaaggccgggacaagtacaagacgctgcggcagatccggcagggcaacaccaagcagcgcatcgacgagttcgaggccctgtaacagccaggccaggaccaagggcagaggggtgctcatagcgggcgctgccagccccgccacgcttgtgtctttagtgctccaagtctaggaactccctcagatcccagttcctttagaaagcagttacccaacagaaacattctgggctgggaaccagggaggcgccctggtttgttttccccagttgtaatagtgccaagcaggcctgattctcgcgattattctcgaatcacctcctgtgttgtgctgggagcaggactgattgaattacggaaaatgcctgtaaagtctgagtaagaaacttcatgctggcctgtgtgatacaagagtcagcatcattaaaggaaacgtggcaggacttccatctgtgccatacttgttctgtattcgaaatgagctcaaattgattttttaatttctatgaaggatccatctttgtatatttacatgcttagaggggtgaaaattattttggaaattgagtctgaagcactctcgcacacacagtgattccctcctcccgtcactccacgcagctggcagagagcacagtgatcaccagcgtgagtggtggaggaggacacttggatttttttttttgttttttttttttttgcttaacagttttagaatacattgtacttatacaccttattaatgatcagctatatactatttatatacaagtgataatacagatttgtaacattagttttaaaaagggaaagttttgttctgtatattttgttaccttttacagaataaaagaattacatatgaaaaaccctctaaaccatggcacttgatgtgatgtggcaggagggcagtggtggagctggacctgcctgctgcagtcacgtgtaaacaggattattattagtgttttatgcatgtaatggactatgcacacttttaattttgtcagattcacacatgccactatgagctttcagactccagctgtgaagagactctgtttgcttgtgtttgtttgtttgcagtctctctctgccatggccttggcaggctgctggaaggcagcttgtggaggccgttggttccgcccactcattccttctcgtgcactgctttctccttcacagctaagatgccatgtgcaggtggattccatgccgcagacatgaaataaaagctttgcaaaggcacgaagcaaaaaaaaaaaaaaaaaaaaaaaa

SEQ ID NO: 684 - DNA, 4394 bp, HOMO SAPIENS
actggcctgggctggggaagcctaggtaagctgaggggcagctctgggaaagtcctaggggtgggggcagtctccacagcctcccacaagggagttaccaccttcccgcacttctgggtacaagtctcctgctctggctgtattccacagttagaacttcatatctttggcttagagctgaattttctgttaccatgtggatgctccaggtgaaggggcccgctcctgcttaaaaacaccatgcatgcagactgctgctgggaatgtgacagttggctgttggagagaagggggcactggcattgagagacctccagactggacatggccctgagtccaggggctaacctggtcttccatgaagacccaaagatgacaccaagtcccccctcctgtggggccccgggattagggtctggtaccatccctcagccccacccagacatggctcaggtgcctatgttgaatctgctcccaagtcctggcttggctctcgttccagatcttaatgattctttgagtccagtctcaggggaggcctcaggcctggtgtctgaaaacacccccagacctgatgacagcagagctatcgctccagcctccctccagatcaccagttcttgttctggtgaagccctggacctggattccaaggatgtctcaaggcctgactcacaggggcgcctctgtccagcctcaaaccccattctgagccctagctctactgaggcccctcgtctgagctctgggaaccaccctcagtcaaattctgaagatgccttcaagtgcctctcaagtaagattttcaagttgggtcagagaaactccaacccttctaggcatgaattaaacccatttataaggcaccattccagagaaggtctggttctgggccactgcatctctaggccaagctcaaaagcactccttattccaacctcaaactcttctctggaccttgactccaatccattgctcaacatgggctcaagaaacacctccaagctgaacctgaatgtagctccagattctcatgggaccctaatcccagacacaaatgagaccatcactttggcttcacataatatctctgagtctgtttcaaaaggagcctttagtaccacctggagcacaagttcaaaggaaaccatgaatgtggcttccagcggccactccagatctgatttgagcgtgaccatcactcaagcctcgtatgtgaccctgattcctggctccagctatggtatcagcctgcactccagcacccatgggcccaactccaccatctctccaccctcatgcatgactctaatcctgggttccaatgagactctgagcctggactccagcctcctgttcagcgacacctccaccttgacgctgagcagtcagcaggatgatgccaaggacaacagcatccacactgtgcccctggaggagaatctggagagttggagtgagatggccagcattaaggtgggccagttcccgctgggattccccatctccaaccccgcaggcaaggacgccgtgaccttgcaaggcatccctgagggagcctttgatgaagtgacctcatgcctggtgaaggtgccagagaagacagaaggtggcaacaacatggctctggttgagaatgtcaccacccttcagaagagccaggatctgctggaggcagaaggagaaaagaagaccatgataaagaagattatgaggcagatccaggaggagccactggattctctctcaagctccgtccgcaagcaggccatggagatcctgacccagctgagccacacccagcccaccctgggcatgcgggagaggtcggagctggtgaacgtgtgtgtgcacagcgtgttctccctgccctccgtgcaggcgatgcaggagaaggacgaggccaaggctgagaccatccaggctctttaccatcagaccctggaggccctgcagacactgctcaaagccctctttatcgaggaccccactcctgctgggctgaagagcatcttggaggccctggggccttggatgaactctgggaaggcccatgagcgagcacgggctgtgaacaccaatgtctctgtgttgaaccacatgcttctaactctgcctttctttatgcccttggggttcccggcgctggggcttctgctggggagactcatccttcacattggggatcctgatgaggagattggctgtgaggctctggacggcatcatcatcctctacactattctggagctccaaaaacgagccagagataaggaagagaccaacaaaaaggagctatatgagagcaacaagcatttcctggggccctacaaccctgtgagcccgtgccagaacattctgcgggtgatcgaggaatttggagacttcctggggccccagcagataaaggacctgctgctggccgccctggaagggctgaaaggcagctcagaggctccagggaaggactccagggagatgatgcagctggcctcggaggtcatgctcagctcggtgctggagtggtaccgccacagggcgctggaggtgatcccagaaatcatgcaaggcatctacatgcagctgagccacatccaggagcctcgggcccgccaggtggccctgctgcccgtctccctcctggctagctccttcatgaccgaggttgtggtggccctgctcatgtgccccctcccactgaacagcaatggagcagagatgtggaggcagctgatactgtgtaagcccagctgtgatgtccgagacctcctggatctgctcctgggcagcctgaaggagaagcccgtcaccaaggagggccgggcttccatcgtgcccctggcggcagccagcggcctgtgcgagctcctgtccgtcaacagctgcatgggccgtgtgaggcgcatctaccctcagctgctcctggccctgctcattcaggtccattaccacatcggcctcaacctgcctggctgcgtggctcctcccaaggacaccaagaagggtgcacagccctctcccttcgtacctgtgcgctgggtggtgaaagtggtgaaaaccctgctactgaggatgggctgctcttatgagaccacgtttctggaggaccagggtggctgggagctcatggagcaggtggagagccaccaccgcggagtggccttgctggcaagggccatggtgcagtactcctgccaggagctgtgccgcatcctctacctgctcatcccgctcctggagcgaggcgacgagaagcacaggatcacggccaccgccttcttcgtggagctcctccagatggagcaggtgcgccggatccccgaggaatactctctggggcggatggcagaaggcctgagccaccacgaccccatcatgaaggtgctgtccattcgaggcctggtcatcctggcccgcaggtctgagaagaccgccaaggtgaaggccctcctgccctccatggtgaagggcctgaagaacatggatgggatgctggtggtggaagcggtccacaacctcaaggctgtcttcaaggggcgggaccagaagctgatggacagtgcggtctatgtggagatgctgcagatcctgctgccgcacttcagcgacgcacgagaggtcgtgcgctcctcctgcatcaacctgtatgggaaggtggtccagaagcttcgggcaccacgcactcaggccatggaggagcagctggtcagcaccttggtgcccctactgctgaccatgcaggagggcaactccaaggtaagccagaagtgtgtgaagaccctgttacgctgttcttacttcatggcttgggagttgccaaaaagagcttatagccggaagccctgggacaaccaacagcagacagtggccaaaatttgcaagtgccttgtgaacacccaccgagacagcgccttcatattcctcagccagagcctggagtatgccaagaactcacgggcctccctccggaagtgctcagtcatgttcatagggtccctggtcccctgcatggagagcataatgacagaagatcgtctgaatgaagtgaaagctgctctggataacttgagacatgacccagaagcatcagtgtgcatctacgcagcccaggtccaggaccacatcctggccagctgctggcagaactcctggctgccgcacgggaactcatgggtgtgttactcagccaccacccaccgctggagccccagctgtgagaacctgcccacttcccaccagcggcgctcctggatcatgcaggcactgggctcctggaagatgtccttgaagaagtgacgtccctgagccccaaaccctcctcagggtggttgagttccagccatgctccctataaatgtcatgtggcttacctctcaaaaaaaaaaaaaaaaaaa

SEQ ID NO: 685 - DNA, 1404 bp, HOMO SAPIENS
tggggccgcgagtgctgagcccggcgcgcccgagccgctcctcctcccggcctgctccctgggcggagccggggcagtgcggctctgggctggccgaaggggtggcgctgcgatcccgcagggcagcgacgcgactctggtgcgggccgtcttcttccccccgagctgggcgtgcgcggccgcaatgaactgggagctgctgctgtggctgctggtgctgtgcgcgctgctcctgctcttggtgcagctgctgcgcttcctgagggctgacggcgacctgacgctactatgggccgagtggcagggacgacgcccagaatgggagctgactgatatggtggtgtgggtgactggagcctcgagtggaattggtgaggagctggcttaccagttgtctaaactaggagtttctcttgtgctgtcagccagaagagtgcatgagctggaaagggtgaaaagaagatgcctagagaatggcaatttaaaagaaaaagatatacttgttttgccccttgacctgaccgacactggttcccatgaagcggctaccaaagctgttctccaggagtttggtagaatcgacattctggtcaacaatggtggaatgtcccagcgttctctgtgcatggataccagcttggatgtctacagaaagctaatagagcttaactacttagggacggtgtccttgacaaaatgtgttctgcctcacatgatcgagaggaagcaaggaaagattgttactgtgaatagcatcctgggtatcatatctgtacctctttccattggatactgtgctagcaagcatgctctccggggtttttttaatggccttcgaacagaacttgccacatacccaggtataatagtttctaacatttgcccaggacctgtgcaatcaaatattgtggagaattccctagctggagaagtcacaaagactataggcaataatggagaccagtcccacaagatgacaaccagtcgttgtgtgcggctgatgttaatcagcatggccaatgatttgaaagaagtttggatctcagaacaacctttcttgttagtaacatatttgtggcaatacatgccaacctgggcctggtggataaccaacaagatggggaagaaaaggattgagaactttaagagtggtgtggatgcagactcttcttattttaaaatctttaagacaaaacatgactgaaaagagcacctgtacttttcaagccactggagggagaaatggaaaacatgaaaacagcaatcttcttatgcttctgaataatcaaagactaatttgtgattttactttttaatagatatgactttgcttccaacatggaatgaaataaaaaataaataataaaagattgccatgaatcttgcaaaaaaaaaaaaaaaaaa

SEQ ID NO: 686 - DNA, 1614 bp, HOMO SAPIENS
aacgggcacttccggagccgggcgtctacagaccgcggccaccttccacctgcgcccgaggcagacggtgcaggggcctccgggacaggcgtctgaggcctgctccgcagcgcgggcccgggggcgggcctaggggcggggcctgctgtggtgcgctcaggcaccgcgctggccacctgtgcccgggtcctagtggcggccgcagtgtcgcaggccggagggaagatggcggcgccctggtggcgagccgcgctgtgcgagtgtcggagatggcggggcttcagcacctcggccgtcctgggccgccggacacccccgctggggccgatgcccaacagtgacatcgacttgagcaacctggagcggctggagaagtaccggagcttcgaccgctaccggcgccgagcagagcaggaggcgcaggccccgcactggtggcggacctaccgagagtatttcggggagaagacagatcccaaagagaagattgatattgggctgcctccacccaaagtctcccggacccaacagctactggaacggaaacaggccatccaggagcttcgggccaatgtggaagaggagcgggctgcccgcctccgcacagccagtgtcccgctggatgccgtgcgggccgagtgggagaggacctgtggcccctaccacaagcagcgtctggctgagtattacggcctctaccgagacctgttccacggtgccacctttgtgccccgagtccccctgcacgtggcctacgctgtgggtgaggatgacctgatgcctgtgtactgtggcaatgaggtgactccaaccgaggctgcccaagcgccagaggtgacctatgaggcagaagagggctccttgtggacgttgctactcactagcttggatgggcacctgctggagccagatgctgagtacctccactggctgctaaccaacatcccgggtaaccgggtggctgaaggacaggtgacgtgtccctacctcccccccttccctgcccgaggctccggcatccaccgtcttgccttcctgctcttcaagcaggaccagccgattgacttctctgaggacgcacgcccctcaccctgctatcagctggcccagcggaccttccgcacttttgatttctacaagaaacaccaagaaaccatgactccagccggcttgtccttcttccagtgccgctgggatgactccgtcacctacatcttccaccagcttctggacatgcgggagccggtgtttgagttcgtgcggccgcccccttaccaccccaagcagaagcgcttcccccaccggcagcccctgcgctacctggaccggtacagggacagtcatgagcccacctatggcatctactaaggagccagagtgtgcgcatttcagagcatgggattgatcggcagcaagagtaaagacacagctccagaggcccacactgtggggtctgggccctgccttaggcagcccccctctttggccccctcccgtcaggcccagggcttggagtgaaagtgactctcaggtggtggggtggggaatgtgaataaacatgatttcttgccgggcaaaaaaaaaaaaaaaaaaaaaaaaaaaaaaaaaaaaaaa

SEQ ID NO: 687 - DNA, 7756 bp, HOMO SAPIENS
agtggggcagcaaatggacagggtgggtggcggaaaagggcccgggggaagttattacagggtgtcctcttccgccgccagaagccggaagttgtgtcccggacgtgtcaaccggggtctgagtgctcagagtacagctgcaaccgcgaccatgggcgggaagaacaagcagcgaactaaagggaacctgaggccttcaaacagtggccgagctgcagaactccttgccaaagaacagggaacagtgcctggatttattggttttggaacatctcagagtgacctaggctatgttcctgctattcaaggagctgaagaaattgacagtcttgtagattctgatttccgaatggtgctgcggaaactttcaaagaaagatgtcaccacaaaattaaaagctatgcaggaatttggaaccatgtgtacagagagagacacagaaactgtgaaaggagttcttccatattggccaagaattttttgcaaaatttcacttgatcatgaccgtcgcgtccgagaagccacacaacaagcttttgaaaaacttatccttaaagtaaagaaacagttggctccctacttaaaaagtttaatgggatattggctaatggctcagtgtgatacttacacaccagctgcgtttgcagcaaaagatgcatttgaagcggcttttcctccaagcaagcaacctgaagccatagcattttgtaaggatgaaattacaagtgtgctgcaggatcatcttataaaagaaacacctgatacactcagtgacccgcaaactgttccagaggaagaaagagaagctaaattctaccgggttgtaacttgttccttattggcattaaagagattactttgccttttacctgataatgagcttgattctctggaggagaaatttaagtctcttttatcacagaataagttttggaagtatggaaaacacagtgtacctcagattcgctcagcttattttgagttagtctctgcattgtgccagcgcattccacagttgatgaaagaggaagcatccaaagtgagcccatcagttctacttagcattgatgacagtgacccaattgtctgcccagctctctgggaagctgtactctatacacttacaactattgaggactgttggcttcatgtaaatgcaaaaaagagtgtgtttcccaagctatcaactgtgattcgtgaaggtggtcggggtctagctactgtcatatatccttaccttctgccattcatcagcaagctccctcagtccatcacaaatccaaagttggatttcttcaaaaatttcctcacgtctctagttgctgggctgtcaacagagagaactaaaaccagctctttagagtcctcggcagtaatatctgctttttttgaatgcttacgttttataatgcagcaaaacttaggtgaggaagagattgaacagatgctcgtcaatgatcagttgatcccttttattgatgcagttctcaaagacccaggattgcaacatgggcagctatttaaccatttagcagaaactctaagttcctgggaagccaaagcagacacggaaaaagatgaaaaaacagctcacaacttggagaacgtactgatacatttctgggaaagactgtcagagatctgtgttgcgaaaatcagtgagccagaagctgatgttgagtccgttttgggtgtatctaacctattacaggtgcttcagaagccgaagagctcattgaagtcaagtaaaaaaaaaaatggtaaggttagatttgctgatgagatacttgaaagcaataaagagaatgaaaaatgtgtatcttcagaaggagagaagattgaaggctgggaattaacaactgaaccttctctcactcataattcttcaggccttttgtctcctctaaggaaaaaacctttggaagacttagtctgtaaactcgcagatataagtattaattatgtcaatgaacgaaagtcagagcaacatctaaggtttctttctactctgcttgactccttttcttcaagccgagtatttaaaatgctacttggtgatgaaaaacagagtattgtccaagccaaacctcttgaaatagccaagcttgtacaaaaaaatcctgcggtgcagtttttataccagaaactgataggttggctaaatgaagatcaaaggaaggattttggtttcctggtggacattttgtacagtgctctccggtgctgtgacaatgatatggaaagaaaaaaagtcttggatgatctaaccaaggtggacttgaaatggaattctcttcttaagattattgaaaaggcatgtcctagttcagataaacatgctttagtaactccttggctcaaaggcgatatccttggtgagaaattggtcaacttggcagattgtctttgtaatgaggacttggaatccagggtatcttcagaatctcacttctcagaaagatggactcttctaagcttggtattatcccaacatgttaaaaatgattacttgattggagacgtatatgttgaaagaatcattgttagacttcatgaaactttattcaaaacaaagaaattatcagaagctgaaagcagtgactcatcagtgtcttttatctgtgatgtggcctataactatttcagctcagcgaaaggatgcttgctaatgccatcatctgaagatttattattaactctctttcagttatgtgctcagagcaaagaaaaaacacatttgccagattttcttatctgtaaactgaaaaatacttggctctctggtgtaaatttattggttcatcaaactgacagttcatataaagagagtaccttcctacatttgtctgctctgtggctgaagaaccaagttcaggcttcatctttggatatcaacagtctccaagtcctcttgtctgctgttgatgatttgctaaatacacttctagagagtgaagattcttatcttatgggagtttatattggaagtgtaatgccgaacgacagtgaatgggaaaagatgaggcagtctcttcctatgcagtggttacatagacctcttttagagggaagattgagtttgaattatgaatgtttcaaaacagattttaaggaacaggacataaagacacttcccagccatttgtgtacttcagcattattgagcaaaatggtcttaattgcactgagaaaggaaacagtcttagaaaataatgagcttgagaaaataattgcagaactgctttattcactgcagtggtgtgaagaattagataacccacctatttttctaattggattttgtgaaatacttcaaaaaatgaatattacgtatgataacttacgtgtacttggtaatacgtcgggccttttgcagctgttatttaacaggtccagagaacatggcacactgtggtctcttattattgctaagttgatcctttcccgaagcatttcatctgatgaagtaaaaccacattataagagaaaagaaagtttttttccactaactgaaggcaatttgcataccattcaaagtctatgtccatttttgtcaaaagaagaaaagaaagaatttagtgctcaatgtatacctgctcttttgggctggactaagaaagatctttgcagcactaatggaggttttggacatcttgccattttcaattcttgtctgcaaaccaaaagtatagatgatggagagctattacatggaatattaaaaatcataatatcctggaagaaagagcatgaagatatttttcttttcagttgtaatctatcagaagcaagtccagaggtactgggtgtaaatatagaaataatccggtttctttccctatttctgaaatactgctcatcccctttggcagagagtgagtgggacttcatcatgtgctccatgttggcttggttggagacaacaagtgagaatcaggcattgtattctattccacttgtgcaactgtttgcctgtgtcagctgtgatttggcctgtgacctcagtgctttctttgattccacaactctggataccattggcaatcttcctgtaaatctaatcagtgaatggaaagaatttttttcccaaggcatccacagtttgcttttacctattttggtgactgttacaggagaaaacaaagatgtgtctgaaacatcctttcagaatgcaatgctgaaacccatgtgtgaaacattaacgtatatctcaaaggaacagctattgagtcacaaacttcctgcaagattagttgctgaccaaaaaacaaacttaccagaatatctccagactttgttaaatacattggccccattactcctcttcagagctaggcctgtgcaaattgctgtttatcatatgctatacaaattgatgcctgaattaccacagtatgatcaggataatctaaagtcatacggagatgaagaagaagagccagccttgtcaccaccagcagcactgatgtctcttcttagcattcaagaggacttactagaaaatgttttggggtgtattcctgttggacagatagttactattaaaccactgagtgaagacttctgttatgttctgggataccttctcacttggaaattaatactaactttcttcaaagctgcatcatcacagcttcgggctttgtattccatgtatcttcggaaaacaaagagtttgaataaattgctctatcacctgttcaggcttatgccagaaaatccaacctatgcagagacagcagttgaggtcccaaataaggaccctaaaacattctttactgaggagctccagctgagtattagagaaacaacaatgcttccataccacattccacacttggcttgttcagtctatcatatgacattaaaagacttgcctgccatggttaggttgtggtggaatagcagtgagaagcgtgttttcaatattgtggatagatttacaagcaagtatgtcagcagtgttctttcttttcaagaaatatcttctgtacaaacaagtacacaactatttaatggcatgacggttaaagctcgagctactactcgagaggtaatggctacttatactattgaggacatagttattgaacttataatacaactgccttcaaattatccactgggttcaataatagtagaaagtgggaaaagagtaggagtagctgttcagcagtggcggaactggatgctgcagttaagcacttacctcacccatcagaatggaagtattatggaaggcttagctttatggaaaaataacgtagacaaacgttttgagggtgttgaagattgcatgatctgtttctcagtcattcacggtttcaactattcccttcccaaaaaagcctgtagaacatgcaagaaaaaattccattcagcctgcttgtacaaatggtttacatctagcaacaaatccacttgtccactgtgtcgtgagacgtttttctgagatttttttcactggaagggatccctgaagtacatcaaacaaaggcattggatttggatccgtctgaaagtgtggatgtggggaagccagtgagcattacttttaaataggaccttctctggaaaattattttggttaatgtaataatcctaaaatcaggtttacttaactttagattgctttgtaaatgtttggaaactttcttttacaaaagaatattacatatttgagagaaaatatttctattaatggtttaatttctttgtatatttaaaaataaatatgaaaaacccctaaattacagaattggaatttgtgaaaagattgcacaactatattattgataaacccattccgtttgttgatctgtgttttagaatagtccaagtgaagcaaaacgaactgagagagctgatttacatctatagatattttaagccttatttattagttatgacaataaattagtattctgatatttgtagattattttaatgataaaaatgacactaagctattaatacggcttgtcttaagatatctggaggcatgctctgaaatcctatataaaagagtttaaactgaactttaaggtgcctccatttatcaagggttatgaaactcagaaaattaaattcttgatgctgacctttttgcttgtgggagaattatttctatatattagtgaaatttgaattgtaaacttgtcagtgaatttatcactctgagcgagtctctagagggtgagaatttgagagaaatagtaatttgattatttcattcatgaagcggagtggtagttatccttctattgagagggaagaaataaatgagtattactgaaacttaaagatcagtggaaaaaaaaaacatttaaaaatgttgtaggagactttcaattttggaagcaaactgagctattcttaccagccaaagttatactaaataagagacttgggggagcaaatgtttttcagccttcagaaatgaaagttaaggattttagcactaggtaaaattcagtataataggctgaagtggagtaagtgaaaacctgccttttgccactcttaaaaattgtgcccaaaatataaaagtgtggaactttagaacttggaataattttattgcagtcttccattacatggaaatagcatatctaatatctaggttacttgagagaccagctaatcatctctgttgcacatgtttaattggcaaaaagcaattcatgataaataaaattactgctttccatctactgggtaaaatgactattgaaatagtatgaatgtggtcagaggattatagttgagagtgaagtactatgtgtgagttatagatctctcgaattatatttatagatgcagtgtcctgcccagttttgtttgcctcctacattttactgtaaaatatttattgtcttctagccttgagcctctgagggtcagtaagtgaagtacagatagcaaaattttactacctcgttaacccttttcttaaaatattctctatctttctatgtctctttctgacatagtaatcccaaaggattgtgttactccccgtgaaagttattacttttcctttaaaaatggttttataataagactgtttaaaacctttccagtattggtacatcttggcttctggcccaaaccccaagcagaaaagaaaatggaataatggagcattgtttttccacattagtattagggcatcagattcttggtgaaacactataattaagtagttataattaaataactgttcttcatacttaggactcttaatacatttctttaagacttgtaagtataattgtaaagcttgttaactgtttatatactaaagaaaaagctttacaagataagactgaaattcagaataccacatctgtacagcgttgacaactctaactaaaaggattacagcccttaaaattttagcttaaggacattttaaaattgcatgagattagcaaaattattaatttaaaaccccaaagtaaattgcaaattttaaaatttatttttgactcttttatcacatgctccaatgtatgtacataagtgtctgtggcttaaataatatgttgttatttgatacatttttgtggtgcaagtaattaatgttattatttgattgttataccatatgtgcccattaaaattctttttaattaaaaatatttcaaatatgcagaaaaataataatataaatgcccttgtacccttcacatactattttgccatatttgcttctgatttttaaataaataaaatgttactcttttgtacttct

SEQ ID NO: 688 - DNA, 4664 bp, HOMO SAPIENS
gcgccccctcccggccgccatgttggctggtgtgtgggtgtcaaactgagccagacgcggcggtggcggcggctccgcgggctacggtcgctcccgcctctcgagcgctgccggtggccgcagcggcgcacccacgccggcccggaggagcagagtgttcatttctgtgtcgggcacagtgctaagtgctgggtgctcactggtgatgaggcagatgaaggttaccaaacttgtggacaggagcctcatatcagagacgtggacctcactgtagcctggtcatggcttccagcttttcgaatctgaggctccaaaggaggaaatgaccattcagggatcttactccagcttgattacggagactgaaccttcatagggtgcgcacttaccaaggacaggaaggtttctctgtttgaagggctttaaacttataacaaagaaaataaaaatgacgacttcgtctatcagacggcagatgaaaaacatcgtgaacaattactcagaggcagaaatcaaagtccgggaagccacctccaatgacccgtggggcccgtccagttctctgatgaccgagattgccgacctgacctacaacgtggtggccttctcggagatcatgagcatggtgtggaagcggctgaatgaccatggcaagaactggcggcatgtgtacaaggcgctgaccctgctggactacctcatcaagacaggctccgaacgtgtggcccagcagtgccgggagaacatcttcgccatccagaccctgaaggacttccagtacattgaccgagatggcaaggaccagggcatcaatgtgcgtgagaagtcaaagcaactggtggctctcctcaaggacgaggaacggttgaaggctgagagggcccaggctctcaaaaccaaagagcgcatggcccaggttgccactggcatgggcagcaaccagatcacctttgggcgaggctccagccagcccaacctctccaccagccactcggagcaggagtatggcaaggccgggggctccccggcctcctaccatggctccacctccccgcgagtgtcctccgagctggagcaagcccggccccagactagtggagaagaggagcttcagctgcagctggcacttgccatgagcagagaagtggctgagcaggaagaacgcctcaggcggggtgatgacctcagattacagatggccctggaagaaagccgaagggacacagttaaaattccaaaaaagaaagagcatggctctctcccacagcagactacgctgttggatttaatggatgctctccccagctcgggccccgcggcccagaaagcagagccctggggcccgtcagcctccactaaccagaccaacccctggggcgggccagcggctcctgcgagtacttcagacccctggccatcgtttggtaccaagccagctgcctccattgacccatggggggtgcccactggagccaccgtacaatctgtccccaagaactcggacccctgggcagcttcacagcagcctgcctccagtgctgggaaaagagcttctgacgcgtggggcgcagtctccaccaccaagcccgtgtctgtctctgggtcctttgagctcttcagtaatctgaatggtacaattaaagatgacttttctgaatttgacaaccttcggacttcaaaaaaaacagccgaatctgtgacctctctgccatcccaaaacaatggaactaccagccctgacccctttgagtctcaacccctgactgtcgcctcaagcaagcccagcagtgcccggaaaacacctgagtccttcctgggccccaacgcggccctggtgaacctggactcactggtgaccaggcctgccccaccagcccagtccctcaaccctttcctggcaccaggtgctcccgccacctcggcccctgttaaccctttccaggtgaaccagccccagccgctgacactgaaccagcttcgggggagcccagtcctggggaccagcacatcctttgggcctggcccaggagtggagtccatggctgtggcctcgatgacctccgcggccccacagccagctctgggggccactggttcctctctgacaccactgggccctgcaatgatgaacatggtgggcagtgtgggtatacccccatcagcagcccaggccactggcacaaccaaccctttccttctctagtgcctgggcctgggacccacccagagcacctgtgctggaggatgccgagcagggactctcgtctgtgggacgggatccaagagtttggggattaggggtattagggcttttcagctccagcttcctgatgaaagggctgtctttacagccccaaccctcagaccctcgccttccaaggcaggcccctcagcctggcctgctctcaccacctcctccaaagcactgaggtcctggcagggctcctctgaggccttggacgaggacgtggagtcatcagtgttgcccttgcccctaacctcagcccgagggtctccaggatgttgcctggcccaggacttgggacagtggccttgtctttgtcctccccaccccccagccctagggacaccccaggcagtcctgggtgtggacacgatgaagcaccggctccataagacaccttttggggaagtggttgtgcatattttatttttctttgactcgtgtgagttcaaagtaaacaccaccaccgtggacaactcttgaattaaatccactagagcgagctttaaaactaatctgagcataacccccaacgtggctctatgcttgtgtacctttgcacatattttgtttagtacagtttcatatttgagtttgcagaattatctaatagtctttttttggctaatatttttataacgtggttcttatttaactgtctagttttgatagaatttaccaggtctggctgaatgaagatgttggcacgtgtcattttagtggtttaaatcctcttatttatggttttaactctaagaaaattttaaaaggaagagatgtttggatgacaaaaaaatgccttattgaaaaactaaagcaaattctttataggaagaaaatatgggaatttgattacacatagatgatgatgtttatttaaaaaaaaaacaacagcaacaaaaaatcctagcctccagttgccttttcctttctttagctcctgtttttggtgaattactaaactgattgactttcagcctttttggctagatcctgagaggctatttttcttacgaatataccaacatcctgaaagttaaagaaaaaaatctaatgtatgaatgtgactcaccaatttttatcaactaattccttttttttattaaaggcatgcagggattaacaggacttctgtttacaatggaaatctgaaatggaagaaacatctttaaccttgtgtgtctgtgatctcctctgtcttaatccacgctcaggctaaagatggggataatgtggaaatggcagttgtcccgagggcgtggggtggggggtgcttctgtgcccacgggtccctgggcaacagtccctaggctaagacaggggtggggggctaagggaccagggctggccctgatccacctacctgctaactccagatattatttttaagttggagacctaaaaataattctcttgtattttggagatgaagaaaaaagtcattcacctgggagggatttttaacaaacatgcactaatattacctccctcttccaaactcctactgtcctcacctcacccaccactgtaaaagtattacgtcgtgcattaaagaccagaaaagacttgcttttacccagggaggggacattcccccaatcctgtgtctgggcagcttgcctggtggatgtttctggccctttttccaccatgggaatttctcacctctagctctaagggcagctgaccacctgccagcccctctctggttccagaagattacccttcgcaccggcacaggagagatcttaaatggtctctgggctgctgggacatgcaggctctgagtggggactgcacccactcatgctgttcctgaggccgccctctccagtcccaggagccgtgtctagagttcctgaccagccaccttctgccagaactgcaggcctgcggctgggtcttaggctcccgctgccatttgggtaagccggtggctggtctcgtctgccgggggaagggtggggaggtgcaatgggatgggaggcaggatgcttgcccagaaaggtgctttccttcagacggtgcagggcctgggccagccttacaggtcagtagactagactcgactacttggggtcagtgattcttttgtaacgagtctttcatgatgtgactttgaggccccaacatgacagccactgggccaccgggacccaagaagacagccccctgccccatcttctggcacaggccatcccgagtgcatgtccctgttgcccactgcactgatcatgaagccaccggccactgccacgcatgttgcacctgtgccatcgtgctccctcctgatgggcaccgtggtggaggaagtcacccagctgtttctcagtcccagaggccggtggctggttttgaacttgtgttgactgttgatacttatttactgtataaatataatttatcatttgtaccatga

SEQ ID NO: 689 - DNA, 14734 bp, HOMO SAPIENS; identical to SEQ ID NO: 424

SEQ ID NO: 690 - DNA, 3358 bp, HOMO SAPIENS
gcagggagcttaacagccaggcctggacaccctcaagagactgtgtgctgattctcagtcgtcactccttggatcaggaaccatagtcctgatctttgaccatcagtctgtgacctgccccttctctttacatgcagccgctctctgctccctgccccaatgaacatctgcactaggcccaagccttggagtaatttacctgaagagtgacaccattgattttgaaactactgaagaaacccaagacagctgaaaaccagaaggcatctgaggagaatgagattactcagccgggtggatccagcgccaagccgggccttccctgcctgaactttgaagctgttttgtctccagacccagccctcatccactcaacacattcactgacaaactctcacgctcacaccgggtcatctgattgtgacatcagttgcaaggggatgaccgagcgcattcacagcatcaaccttcacaacttcagcaattccgtgctcgagaccctcaacgagcagcgcaaccgtggccacttctgtgacgtaacggtgcgcatccacgggagcatgctgcgcgcacaccgctgcgtgctggcagccggcagccccttcttccaggacaaactgctgcttggctacagcgacatcgagatcccgtcggtggtgtcagtgcagtcagtgcaaaagctcattgacttcatgtacagcggcgtgctacgggtctcgcagtcggaagctctgcagatcctcacggccgccagcatcctgcagatcaaaacagtcatcgacgagtgcacgcgcatcgtgtcacagaacgtgggcgatgtgttcccggggatccaggactcgggccaggacacgccgcggggcactcccgagtcaggcacgtcaggccagagcagcgacacggagtcgggctacctgcagagccacccacagcacagcgtggacaggatctactcggcactctacgcgtgctccatgcagaatggcagcggcgagcgctctttttacagcggcgcagtggtcagccaccacgagactgcgctcggcctgccccgcgaccaccacatggaagaccccagctggatcacacgcatccatgagcgctcgcagcagatggagcgctacctgtccaccacccccgagaccacgcactgccgcaagcagccccggcctgtgcgcatccagaccctagtgggcaacatccacatcaagcaggagatggaggacgattacgactactacgggcagcaaagggtgcagatcctggaacgcaacgaatccgaggagtgcacggaagacacagaccaggccgagggcaccgagagtgagcccaaaggtgaaagcttcgactcgggcgtcagctcctccataggcaccgagcctgactcggtggagcagcagtttgggcctggggcggcgcgggacagccaggctgaacccacccaacccgagcaggctgcagaagcccccgctgagggtggtccgcagacaaaccagctagaaacaggtgcttcctctccggagagaagcaatgaagtggagatggacagcactgttatcactgtcagcaacagctccgacaagagcgtcctacaacagccttcggtcaacacgtccatcgggcagccattgccaagtacccagctctacttacgccagacagaaaccctcaccagcaacctgaggatgcctctgaccttgaccagcaacacgcaggtcattggcacagctggcaacacctacctgccagccctcttcactacccagcccgcgggcagtggccccaagcctttcctcttcagcctgccacagcccctggcaggccagcagacccagtttgtgacagtgtcccagcccggtctgtcgacctttactgcacagctgccagcgccacagcccctggcctcatccgcaggccacagcacagccagtgggcaaggcgaaaaaaagccttatgagtgcactctctgcaacaagactttcaccgccaaacagaactacgtcaagcacatgttcgtacacacaggtgagaagccccaccaatgcagcatctgttggcgctccttctccttaaaggattaccttatcaagcacatggtgacacacacaggagtgagggcataccagtgtagtatctgcaacaagcgcttcacccagaagagctccctcaacgtgcacatgcgcctccaccggggagagaagtcctacgagtgctacatctgcaaaaagaagttctctcacaagaccctcctggagcgacacgtggccctgcacagtgccagcaatgggaccccccctgcaggcacacccccaggtgcccgcgctggccccccaggcgtggtggcctgcacggaggggaccacttacgtctgctccgtctgcccagcaaagtttgaccaaatcgagcagttcaacgaccacatgaggatgcatgtgtctgacggataagtagtatctttctctctttcttatgaacaaaacaaaacaacaacaaaaaacaaacaaacaaaaaagctatggcactagaatttaagaaatgttttggtttcatttttactttctgtttttgtttttgtttcgtttcattttgtactacatgaagaactgttttttgcctgctggtacattacatttccggaggcttgggtgaataatagttttcccagtctccctcggatggtggccttaaggcctggtagtgcttcaagaggtccactggttggatctctagctactggcctctaaatacaacccttctttacaaaaaaatcttttaaaaaaaagtaaaaaaaaaaaaaaaatttccacttgtgaagagcactacaaaaaatatataacaaaatctaaaaggcctactgtctttaagtacaccgcttgcagtgtttcagtggacattttcacaattctggccgcttggacttcacagtaaccagttaaaactgtggaatatcacttctggttgaaaacccagaggaaaggccctgctgttttccacctaccacgttgtctgatttcataaaagggctgtgggggtgggaagggcagtgggttcggtggtgtgggaaagaaagacgaatggcaggcttcttccccagattctgcccgggtccacacaccctggcccaccttctccatatccccctcttgcagcagaagccaggaagacttggacaagcaacaagcaacagtggctatcgtatttattcagtgtcttcgctgagccacagcctcagcacaatcaagagggactttcatgaaaggcaggaatgcagataaaacaaagatatcagaaatttgcacctatgtttctaggtacaagagaaggattatttccaacaatctttgcaaaaaaaaaaaaa

SEQ ID NO: 691 - DNA, 6297 bp, HOMO SAPIENS
atgaggagcctgccgagcctgggcggcctcgccctgttgtgctgcgccgccgccgccgccgccgccgccgtcgcctcagccgcctcggcggggaatgtcaccggtggcggcggggccgcggggcaggtggacgcgtcgccgggccccgggttgcggggcgagcccagccaccccttccctagggcgacggctcccacggcccaggccccgaggaccgggcccccgcgcgccaccgtccaccgacccctggctgcgacttctccagcccagtccccggagaccacccctctttgggcgactgctggaccctcttccaccacctttcaggcgccgctcggcccctcgccgaccacccctccggcggcggaacgcacttcgaccacctctcaggcgccgaccagacccgcgccgaccaccctttcgacgaccactggcccggcgccgaccacccctgtagcgaccaccgtaccggcgcccacgactccccggaccccgacccccgatctccccagcagcagcaacagcagcgtcctccccaccccacctgccaccgaggccccctcttcgcctcctccagggcatcagtggcctgtggcaaagatgccccaaaagtatctaggaaaatatgcctgtgagagtaacctgaaaagcaagtacttgcctcttacacagccagtcatgaatcttagagtctcagaagctgttaaaacggagtatgtatgtaactgctctgtggttggaagcctgaatgtgaatcgctgcaaccagaccacagggcagtgtgagtgtcggccaggttatcaggggcttcactgtgaaacctgcaaagagggcttttacctaaattacacttctgggctctgtcagccatgtgactgtagtccacatggagctctcagcataccgtgcaacagttctgggaaatgccagtgcaaagtgggtgtcattggctctatatgtgaccgatgccaagatggatattatggctttagtaagaatggctgcttgccctgccaatgcaataatcggtctgccagttgcgatgccctcacaggtgcttgtttaaactgccaggaaaatagcaaaggaaatcactgtgaagaatgtaaagaaggattttatcagagtcctgatgccactaaagaatgtcttcgctgcccttgttcagcagtgacatctacaggcagctgctctataaaatcgagtgaattggaacctgaatgtgaccagtgtaaagatggttacataggcccgaactgcaataaatgtgaaaatggctattacaattttgacagcatctgtagaaagtgccaatgtcacggccatgtggacccagttaaaactccaaagatttgtaagcccgagagtggtgagtgcatcaactgcctccataacaccactgggttttggtgtgagaactgcctagaaggttatgttcacgacctcgagggaaattgcatcaagaaagaagttattcttccaacacctgaaggttctaccattttggtttccaatgcctctttgaccacatcagtgcccacccctgttataaatagtacttttacccctacaaccctgcagactatcttttcagtaagcacttctgaaaacagcacttcagctttagctgatgtatcatggacccaatttaacatcatcattttgacagtcatcatcattgttgtggtgctgctaatgggatttgtgggggctgtatatatgtaccgcgagtaccaaaaccggaaactcaatgcccccttttggaccatcgagctgaaagaagacaatatcagtttcagcagctaccatgacagcattcccaatgcagatgtttcgggattgttggaagatgatggcaatgaagtggctcccaatgggcagctgaccctgacgacgcccatacataactacaaagcctaaggagctagaactgttctgaattgttaaaccacagtgcttgctaagacagagtcagcccctgggccagacaaagcctggctagagtttgctgagaaagcaaaggcaaatagtgcatctgaaattttcaggtacaaatttgtaatgcgcttagcctatctattgctcttagttttcccatgaagatctgaagcgttcactgtcattaggacttgaagtaaagtatatttttgtaccaaaccacatgggagtatggaaaggctgaaccccatagtgcagcccaaaaccactttgacctccagatagactcctggggaagcattcaccaagccagtggtaacaagatgatgaatgtggagggggaaaagactgctggaagacttcatctccattcctgaaacattttttttaaaacagtgtcagggattatattcgttttactatacaaaaggacatcattgaggaaaagcttgtttctaggctgtatcacagtaaataatcttgattgtttctagaacaggggtagaaaagtcccaagatcttcagaagggcttggttttttcctcccaggattcttgctcagtgatgagttgaaagcacaggataagcttctaagggaggaaggcagcattggggagcaggaggctgatggtcctcctcagggtctcagtgtaaatgataaattgtctaaaaataaggaatattcctgcctctagagaaataaggtgtacatagttaatgtagcatatctggtcgacgttgtatttgtatctatttgtaaaaaaaaaatcatgtcatattttatcatctggaatttatttgtacagcagttaatggtgttgtaaaaagaaaaatatggggattgcttaaaatactgtaaaatagatggcaatattgctagagctgggactctggtgagcatccgtcatttttagtccttcttgaggacattgctgaaatttataagaggtcgaatgtttctttctttcctttctcagtctaaaagtagagttatatgctctttgacttactatgattcaagcaatagattttgaagtcagtaatcgttaagctgggacataggatgcattctccaaaaacattaatctaattagacattagccaccctatatattttacatagattaatataaaacatatcctcattaaaaaatgtttttcttgaatgtaaaagatagtcttccaaaggatagaaatattttagttccaagagaaaagccatcatattacttgggatctgtagttttcatgcctatgaaatatttataatcctccctcaccccaaataaaaaatctcctacatgtgaacatagcctgtcactcatttgccatgaggtatgtgccatctccctgcagtgctatagttctcccattgtcttcctgtctggttaatgagcagctttgtagatgggtgtgtctagttagttcttgctttttgatggagttttttcctagaggccaactactgttgctctcgtttattatgatattgacattttgggttaagcaaggtgggtgggaaaggtggtcagatgttaaatataacttattaggaggaacagtgaactgtgaagtggttagaaaaaaaataaaaacttcttattagattagacctaggaaattcaagctgacccctttgcctaacttccctagagaaaaacctagaacttggtcatccctttataggagacccctaagttgttctcagggtttggagatgatgttctggagggagtacaagcaaataatctacttctggtaatctgagggtgctttgcgtatttggccattgctcagaagaatagaggttacattatattacattatatgaaaattatttagtttttctatagccctttgtagtttgcaaagcacttttccatatgtgtgtcctctcttccacaccatagccccctgaggaagtaattgttgtccccattttatagatgaaaaggctgaggcacagaggagctaaatatcttgttcaaggctatacaatgtgtgtgattattaggcttggaatcagggcctctaactctaaagcacatgttttttcaactatatgcagaaattgcctagccatggacacaagaaagctgggaggaagagttctacttgtggatgtttttaattttttttaaatatcaggagcaatccagggccatacagctatgaagcacttagtgaaaagaacacaagaagatttactaactgaagttagtattagtgattagaaaacaaaactgccagtttgtgcttcattaaggtgaactcatctctccaagcaggaagggaaaatttgctttccctagcagttgctgcatatgtgtgtacagactgcacaattctaagaaattgtgcaaaatggcatacctgtctttctcccagatacaccgccccctgccccccccaaaaaaggtcaggattaaaggtggtgagaagtgaacatttattaaacagaagttaaaccaatagagagaaaggaggtttgttggagtctaagaggattttgaccatgtagaaattccttgaaacagaccttaaaaggtattgaaaaattgaatcacaaagaaagtttacctttaaatacttgttaatggctcctagatcatggttataatttttctcaatgggaaaaaaagtcttaaaatttgttttaaataagatcctctaatgtctcgagctttttgattctggaaataatttgctttaaaatataaatcaatcagaaagtgatctaccactgaaatcattctaggaaactagcatgggatgcactgcacaatgttctttcctctaaaggcatgggccccataaactgtggcatctggcagcaggatgccatcagtcctttagaaagcctaattttgggccgggtgcggtggctcacgcctgtaatcccagcactttgggaggccgaggcgggtggatcacaaggtcaggagttcgagaccagcctggtcaacatggcgaaatcccgtctctactaaaaacacaaaaattagccgggtgtacgtgcctgtagtctcagctacttgggaggctgaggcaggagaatcacttgaacctgggaggcagaggttacagtgagccgagatggcgccatttcactccagcctgggcgacagagcaagactctgtctcaaaaaaaaggaagaaaaagaaagcctaatattgggagaatgtttgtgtaaggattggaaatctgtttatttttaaataagatagcactgatgtgaatcttatttggaaattacagatactgccattaagcgatgcttttatcttcattaattcattttggtaagcgcctatgcatttctgatggttaggtgccctaggtagtgttaagtatgtccgtgtcctcccttactcccctctcgctccctctaccctctatcccctagggttcttttattaatggaatttctccagttatagagaaaaaaatgacatttgaaaactaaagctcatttatattaatactaaggtcctgtgggcctagtgcgttactcttcccagtgatacctagattttaagagtagagaacagaggaaacatgggatgagaggagagaggttttttagacaacatttgtagacacctcaaattatatcactgttctctagcgccaatattcccaggtaaattgaccattaaagcaatactcactgacctactagtttattttggtcagctgagtaccatcaggatatttaaccctttaagtgctgttttgggagtagaaaactaaagcaacaatacttcctcttgacagctttgattggaatggggttattagatcattcaccttggtcctacactttttaggatgcttggtgaacataacaccacttataatgaacatccctggttcctatattttgggctatgtgggtaggaattgttacttgttactgcagcagcagccctagaaagtaagcccagggcttcagatctaagttagtccaaaagctaaatgatttaaagtcaagttgtaatgctaggcataagcactctataatacattaaattataggccgagcaattagggaatgtttctgaaacattaaacttgtatttatgtcactaaaattctaacacaaacttaaaaaatgtgtctcatacatatgctgtactaggcttcatcatgcatttctaaatttgtgtatgatttgaatatatgaaagaatttatacaagagtgttatttaaaattattaaaaataaatgtatataatttgtacctattgtagatttgttgtttacttttttgtgtggtcagagttgtttcatgtcttcaaatacatgccaaggatcatttactttcagcccacttcataaaaatctttgaactctt

SEQ ID NO: 692 - DNA, 893 bp, HOMO SAPIENS
gcctgcgcgatgcaagacgggagaaaaggaggggcgtacgcgggcaagatggaggcgactacggctggtgtgggccggctagaggaagaggcgttgcggcgaaaggaacggctgaaggccctacgggagaaaaccgggcgcaaggacaaggaagatggggagccaaagaccaagcatctcagagaagaggaggaagaaggcgagaagcacagggaacttaggctgcggaactatgtcccggaggatgaggacctgaagaagaggagggtgccccaggccaaaccggttgcagtggaggagaaggtgaaggagcagctggaggccgccaagcccgagcccgtcatcgaggaggtggacctggccaacctcgctcctcggaagcctgactgggacctcaagagagatgtggccaagaagctggagaaactaaaaaagcggactcagagggccattgccgagctgatccgtgaaaggctgaaaggccaggaagacagcctagcctctgcagtggatgctgccaccgaacaaaagacctgtgactccgactgaggcatgccctgccccaccactcgcccatcaggcctgtcctgcagaggatggtcttgggcagggatgggggctaggcttgccatcacctccagtttggcttctgagcagagactccctgcccatcaagtctgaaacccccatggatgaggtcagctccttgtctgctgggtggcccctgccattctgaatggaggcagaaccagcaacaactctgggcgtgcctgtgtctgcacatgtggatgtacatatgtctgtatatatgtatatattttgaactttctaaaaaaaaatctggaaatagaaacaagtaaacccctgtgtgtggcaaaaaaaaaaaaaaaaaa

SEQ ID NO: 693 - DNA, 1128 bp, HOMO SAPIENS
agtccgagtggagagagcgagctgagtggttgtgtggtcgcgtctcggaaaccggtagcgcttgcagcatggctgaccaactgactgaagagcagattgcagaattcaaagaagctttttcactatttgacaaagatggtgatggaactataacaacaaaggaattgggaactgtaatgagatctcttgggcagaatcccacagaagcagagttacaggacatgattaatgaagtagatgctgatggtaatggcacaattgacttccctgaatttctgacaatgatggcaagaaaaatgaaagacacagacagtgaagaagaaattagagaagcattccgtgtgtttgataaggatggcaatggctatattagtgctgcagaacttcgccatgtgatgacaaaccttggagagaagttaacagatgaagaagttgatgaaatgatcagggaagcagatattgatggtgatggtcaagtaaactatgaagagtttgtacaaatgatgacagcaaagtgaagaccttgtacagaatgtgttaaatttcttgtacaaaattgtttatttgccttttctttgtttgtaacttatctgtaaaaggtttctccctactgtcaaaaaaatatgcatgtatagtaattaggacttcattcctccatgttttcttcccttatcttactgtcattgtcctaaaaccttattttagaaaattgatcaagtaacatgttgcatgtggcttactctggatatatctaagcccttctgcacatctaaacttagatggagttggtcaaatgagggaacatctgggttatgccttttttaaagtagttttctttaggaactgtcagcatgttgttgttgaagtgtggagttgtaactctgcgtggactatggacagtcaacaatatgtacttaaaagttgcactattgcaaaacgggtgtattatccaggtactcgtacactatttttttgtactgctggtcctgtaccagaaacattttcttttattgttacttgctttttaaactttgtttagccacttaaaatctgcttatggcacaatttgcctcaaaatccattccaagttgtatatttgttttccaataaaaaaattacaatttaccc

SEQ ID NO: 694 - DNA, 7205 bp, HOMO SAPIENS
attgccaagatggcgccggtcgcggtggccgcggaggctagagtcggagaaagaggcggaggcagtggcggccgcgaggggagggggagtcccgtctgactgagacggcaggcctgggcgggcgggcgggggtgccgcgaagggcggagcgccgggctggggatgagctaagcgggctcagagcgccgcggcattcagcccctcgtgttccgctaccgcgcgtgcgggattccggcgccgctctccgagctcgatccgctgctcgcacgggagccagctgggtgttatttctcaaactctgaggctgcggagttcacacattgaaatctgtcatctttttcagagagaaactttcgatgtaaccttctgtaatggaagatgattgaagacaaggggcctcgtgttgctgactactttgttgtagcaggattaactgatgtttcaaagcctctagaagaagaaattcacttcaatgatgcttgtcataaagtagctaaaccaaaagaacctattacagatgtttcagttattatcaaatctcttggggaggaagtcccacaggattatatctgtattgatgttaccccaactggattgtcagctgatcttaataatggaagtcttgtggggccacagatttacctttgctatagaagaggaagagataagcctccacttacagatctgggggttttatatgactggaaagaaagattgaaacagggttgtgaaattattcagagtactccctatgggcgccccgcaaatattagtgggagtacctcatcacaaagaatttatatcacttaccgaagagcctctgaaaacatgactcagaatacgttggctgtcactgacatatgtattattatacccagtaaaggagaaagcccaccacacacgttctgcaaagtcgacaagaatctcaataacagtatgtggggatcagcagtatacttgtgttataaaaaatcggtggcaaagacgaacactgtatcttacaaagctggcctaatttgtagatatcctcaagaagattatgagtcattctcactaccggaatctgttcctctattttgtttaccaatgggtgcaaccattgaatgttggccatcaaatagcaaataccctctgcctgtattttctacttttgttttaactggagcctcagctgaaaaggtttatggtgctgctattcagttttatgaaccatactctgaggagaatctcacagaaaagcagagacttcttttgggtttaacatcagcagatgggaagtctgatagttccaaaacaattcatactaacaaatgcatctgtcttctttctcactggcctttttttgatgcattcaggaagtttctgacttttctgtatcgttattccatctctgggcctcatgtccttccaattgagaagcatatttctcattttatgcataaagttccttttccatctcctcagagaccacggattttagttcagttatcaccacatgataatctgattctcagtcagcctgtgtcttcacctcttccactaagtggtggcaagttttcaacactactgcagaatttaggccctgaaaatgctgtgacactactggtgtttgcagtaacagaacataaaattcttatccattccctacggccatccgtgcttactagtgtgacagaagcattagtgtctatgattttccctttccactggccatgcccgtatgttcctctctgcccactggctttagcagatgtcttgagtgcaccatgtccattcatagtagggattgattcaagatactttgatctctatgatcctccaccagatgtcagttgtgttgatgtagataccaacactatttctcaaattggtgacaagaaaaatgtagcctggaagatacttccaaagaagccatgtaaaaatctgatgaacacactgaataatttgcatcagcaattggcaaaattgcagcagagaccgagagatgatggactcatggatttagcaataaatgactatgattttaattctggaaagaggttgcacatgatagatttggaaatccaagaggcatttttgtttttcatggcctctattttaaaaggttacagatcatacttaaggccaataacacaagccccatctgagacagccacagatgcagcctctctctttgccctacaagctttcttaagaagccgggaccggtcacatcaaaaattctataacatgatgaccaaaacacaaatgtttattcgcttcattgaagaatgttcttttgttagtgacaaagatgcaagcctggcattttttgatgattgtgtagataaagtggatatggacaagagcggtgaagtacgacttatagaactggatgaatctttcaaaagtgaacacactgtttttgtaacaccacctgagatcccccacctacccaatggtgaagaaccccctttacagtacagctataatggatttccagttcttaggaacaatttatttgaaagacctgaaggatttctacaagcaaagaagaacaaattgccttcaaaatcaagtagtcctaatagccctttgcccatgttcagaagaacaaaacaggaaattaaatcagcccataaaattgcaaagaggtactcttccatccctcagatgtggtctaggtgtctactgcgccactgttatggactgtggtttatttgtctcccagcttatgtgaaagtctgtcattcaaaagtcagggctctgaaaacagcatatgatgtgcttaaaaaaatgcagtcaaagaagatggatccacctgatgaggtatgctaccgcattcttatgcaactctgtggacaatatgatcagccagtgcttgcagttcgagtgctttttgaaatgcagaaagctggtattgaccccaatgccattacttatggttattataataaggctgttttggaaagtacctggccttcaagaagtcgtagtggctattttctttggacaaaagtaagaaatgttgttttaggagtaacacagttcaaaagagctttaaagaagcatgcacacttatcacaaacaactctctcaggtggccagtctgatcttggatataattcattatctaaagatgaagttagaagaggggatacatctactgaagacattcaagaagaaaaagataaaaaagggagtgattgtagttccttgtcagagagtgagagtacaaaaggaagtgctgattgccttcctaagctcagttatcaaaattcttccagtatcgttcgcctcactggtacaagtaacaacagtgctggtaaaatatcaggagaaagcatggaaagcacacctgagctgctcttaatatcatctcttgaagatacaaatgaaacacgaaacattcaaagtagatgcttcaggaaaagacataaaagtgacaatgaaactaatttgcagcagcaagtggtctggggaaatagaaaccgtaatcttagtggaggggtactgatgggatttatgctcaatagaattaaccaggaagcaacccctggagatatagttgaaaaattgggagctgatgcaaaaattctttcaaatgttatctcaaaaagcacgagaccaaatactcttgatattgggaagccacctttaagatcaaaaagagacagtctagaaaaggaatctagtgatgatgatacaccttttgatggttctaactatttggcagataaagtggattctcctgttatttttgacttagaagacttagacagtgaaacagatgtatcaaaagcaggatgtgttgctacacaaaatcccaagaggattcaacgtatgaacagcagcttttcagtaaaaccttttgaaaaaactgatgtcgcaacaggatttgatcccctctctcttttggttgctgagactgaacagcagcaaaaagaagaagaggaggaggatgaagatgatagcaaaagcatttcaacaccatctgctaggcgtgatttagctgaagaaattgtgatgtatatgaataacatgagcagtcctttgacaagtcgtacaccaagcattgatttacaacgggcatgtgatgataaattaaataagaaaagtccaccattggtcaaggcatgcagaagatctagtctgcctcctaattctcctaagccagtgagacttaccaaatctaaaagttacacaaaaagtgaggagaaaccaagggatagactttggtcttctccagccttctcacctacttgcccatttagggaagaatctcaggatacattaacccactcatcaccttcatttaacttagatacactactagtacctaaactagatgttctaagaaacagtatgttcactgctggaaaaggagttgcagagaaagcaagcaaatggtattcaagattcaccatgtacaccacatcatctaaggatcaaagttctgatcgtaccagtctttcttcagtgggagcccaggattctgaatctacctctttaacagatgaagatgtctgccatgagttggaaggacctatctcctctcaagagaccagtgctacttcagggactaagagaattgatctcagccgaataagcctggaaagttctgcatccttggaaggatctctgtcgaagtttgccttacctgggaaatcagaagtgacatcttccttcaacgcgagtaatacaaatatcttccagaactatgcaatggaggttctcatctcaagttgctctcggtgtagaacttgtgattgtcttgtccatgatgaggaaatcatggctggctggacagcagatgattcaaatctcaatactacatgcccattctgtggcaatatcttcttaccctttctgaatatagaaataagagatttaagacgacctggaagatactttctaaagtcaagcccatcaacagaaaatatgcactttccatcctccatttcaagtcagacgaggcagtcttgcatttcaacatcagcctctggtcttgacacatctgctctctctgttcaagggaattttgatctaaatagcaaatctaaactgcaggaaaatttttgcacccgaagtattcagatccctgctaatagatcaaaaacagctatgtctaaatgtccaatatttccaatggccaggagtattagtacttctggccccttggataaggaagatactggaagacagaagctcatttctacaggcagcctgccagctactttacaaggagctacagattctttaggtttagaatggcaccttccaagtcccgatcctgtcactgttccgtatcttagtcctttagtggtatggaaagaacttgaaagcttattggaaaatgaaggtgatcatgcaataacagtagcagactttgtggaccatcatccaattgttttttggaacctggtatggtatttcagacgtcttgacttgcccagtaacttacctggattgattctttcttctgagcactgtaacaagtattcaaagattccccgccactgtatgtctgaagatagcaaatatgttttaatacaaatgttatgggacaatatgaagttacatcaggatccgggacagcccttgtacattctctggaatgcacacacccaaaaatatccaatggtccatttattgcaaaaaagtgataactcatttaaccaggaactgttgaaaagtatggtaaaaagcattaaaatgaatgatgtctatggaccaatgagtcagattttagagacactgaataagtgtccacattttaaaagacagaggagtttatacagagaaatactatttctctcacttgtggcactgggaagagaaaacattgatatagatgcttttgataaagagtacaagatggcatacgatcgtctcacacctagtcaagtcaagagtacacacaactgtgatagaccaccaagtacaggggtgatggaatgtcgaaaaacctttggagaaccttatctttaagatgtatttgtatgtgtaaacattcaatgtatattgtatagtcagtgtataaaataacacttttagactctaaatattttttcttcaatttttgaaaatacaatttgtaaatggttcaaaagactcagacagcttatgtacagaatgtttgaagaagagaatagtgacaagtggggagaaagccactttgtttctcatttcttttttcttcttctttaactcccctgtaataggaaataaagtatttttgtgatgaggaaatccctaaacaaaattagttgccataaaatatgacaactgctttatggtttcttttggaagagacagattgaaaaatcatgaatggaatctaaacagaaatgtcagatgaacgtatttcctgttttcatagactattcaaatgttttgaccatgaagttgtattatacatattttaaattgtttatagtaagttgatatttttttaatttttaaatttaatatagcaaacttaaaatgaatttaaacttaagcaagcaagcgtgtattttccttgtctgctgctatttgaagtaattagtacagctgcagatctctctgtgtatatctatctatatatatattttttattacttgggagaatgaattttaaaatgtcagtgctagtgtcaagtgttgtcctaggattgcatgttagtacccctaagcctgagtgtggggagtgagttatgcaagggtagcgtgcactgcccagactgactcatggagccttgtgcaaggagagccagagaggttcactataccatgactccaaaattgtctctattgctaatagatacgtatagtatacagggaaaacagcttataaatccaaatatcaatttaaattttaatattctacatgaaaacttacattgggaaatatgcagacaagtgattatattccaaattttacccttattttaatatctaaaatattgggtatgatgcaaattatactatagaatatttatctgaaatatgacttactggggtattctgttaatactatatataaatattcagaatttttttcaaaagtagaaaaattcccctctaaaagtacagccagatagattttcatccatattgaggaacttagctttttcaacaagcttcagaatctgaagtctgtagaatctaaaatacagaaatatccagaaatcagacaataaattgaaagtttagacatcatgagtattaaatagctttaaaaa

SEQ ID NO: 695 - DNA, 7949 bp, HOMO SAPIENS
gggagagggagacgcaggcggcgaaacggcagaggagccgagccccctccgcccaaggcgccctccctccgtccgcgcacaggcgccgtcgcttggaggagcaaggtgcctcccagcccgcaggggcgccgcgcgcaagcccgcgggctcttcggtggctctgccccgggactgcacctggaggcggccccggacggggatggtcagcggctgctgccgtctggctcgcgagcgggacgctgtgagggcaccatggcgctgactcccgggtgggggtcctcggcggggccggtccggccggagctctggctgctgctgtgggcagccgcgtggcgcctgggtgcctcggcgtgccccgccctctgcacctgcaccggaaccacggtggactgccacggcacggggctgcaggccattcccaagaatatacctcggaacaccgagcgcctggaactcaatggcaacaacatcactcggatccataagaatgactttgcggggctcaagcagctgcgggtgctgcagctgatggagaaccagattggagcagtggaacgtggtgcttttgatgacatgaaggagctggagcggctgcgactgaaccgaaaccagctgcacatgttaccggaactgctgttccagaacaaccaggctttgtcaagactggacttgagtgagaacgccatccaggccatccccaggaaagcttttcggggagctacggaccttaaaaatttacagctggacaagaaccagatcagctgcattgaggaaggggccttccgtgctctgcgggggctggaggtgctgaccctgaacaacaacaatatcaccaccatccccgtgtccagcttcaaccatatgcccaagctacggaccttccgcctgcactccaaccacctgttttgcgactgccacctggcctggctctcgcagtggctgaggcagcggccaaccatcgggctcttcacccagtgctcgggcccagccagcctgcgtggcctcaatgtggcagaggtccagaagagtgagttcagctgctcaggccagggagaagcggggcgcgtgcccacctgcaccctgtcctccggctcctgcccggccatgtgcacctgcagcaatggcatcgtggactgtcgtggaaaaggcctcactgccatcccggccaacctgcccgagaccatgacggagatacgcctggagctgaacggcatcaagtccatccctcctggagccttctcaccctacagaaagctacggaggatagacctgagcaacaatcagatcgctgagattgcacccgacgccttccagggcctccgctccctgaactcgctggtcctctatggaaacaagatcacagacctcccccgtggtgtgtttggaggcctatacaccctacagctcctgctcctgaatgccaacaagatcaactgcatccggcccgatgccttccaggacctgcagaacctctcactgctctccctgtatgacaacaagatccagagcctcgccaagggcactttcacctccctgcgggccatccagactctgcacctggcgcagaaccctttcatttgcgactgtaacctcaagtggctggcagacttcctgcgcaccaatcccatcgagacgagtggtgcccgctgtgccagtccccggcgcctcgccaacaagcgcatcgggcagatcaagagcaagaagttccggtgctcagccaaagagcagtacttcattccaggcacggaggattaccagctgaacagcgagtgcaacagcgacgtggtctgtccccacaagtgccgctgtgaggccaacgtggtggagtgctccagcctgaagctcaccaagatccctgagcgcatcccccagtccacggcagaactgcgattgaataacaatgagatttccatcctggaggccactgggatgtttaaaaaacttacacatctgaagaaaatcaatctgagcaacaacaaggtgtcagaaattgaagatggggccttcgagggcgcagcctctgtgagcgagctgcacctaactgccaaccagctggagtccatccggagcggcatgttccggggtctggatggcttgaggaccctaatgctgcggaacaaccgcatcagctgcatccacaacgacagcttcacgggcctgcgcaacgtccggctcctctcgctctacgacaaccagatcaccaccgtatccccaggagccttcgacaccctccagtccctctccacactgaatctcctggccaaccctttcaactgcaactgccagctggcctggctaggaggctggctacggaagcgcaagatcgtgacggggaacccgcgatgccagaaccctgactttttgcggcagattcccctgcaggacgtggccttccctgacttcaggtgtgaggaaggccaggaggaggggggctgcctgccccgcccacagtgcccacaggagtgcgcctgcctggacaccgtggtccgatgcagcaacaagcacctgcgggccctgcccaagggcattcccaagaatgtcacagaactctatttggacgggaaccagttcacgctggttccgggacagctgtctaccttcaagtacctgcagctcgtggacctgagcaacaacaagatcagttccttaagcaattcctccttcaccaacatgagccagctgaccactctgatcctcagctacaatgccctgcagtgcatcccgcctttggccttccagggactccgctccctgcgcctgctgtctctccacggcaatgacatctccaccctccaagagggcatctttgcagacgtgacctccctgtctcacctggccattggtgccaaccccctatactgtgactgccacctccgctggctgtccagctgggtgaagactggctacaaggaaccgggcattgctcgttgtgctgggccccaggacatggagggcaagctgctcctcaccacgcctgccaagaagtttgaatgccaaggtcctccaacgctggctgtccaggccaagtgtgatctctgcttgtccagtccgtgccagaaccagggcacctgccacaacgacccccttgaggtgtacaggtgcgcctgccccagcggctataagggtcgagactgtgaggtgtccctggacagctgttccagtggcccctgtgaaaatgggggcacctgccatgcacaggagggcgaggatgccccgttcacgtgctcctgtcccaccggctttgaaggaccaacctgtggggtgaacacagatgactgtgtggatcatgcctgtgccaatgggggcgtctgtgtggatggtgtgggcaactacacctgccagtgccccctgcagtatgagggaaaggcctgtgagcagctggtggacttgtgctctccggatctgaacccatgtcaacacgaggcccagtgtgtgggcaccccggatgggcccaggtgtgagtgcatgccaggttatgcaggtgacaactgcagtgagaaccaggatgactgcagggaccaccgctgccagaatggggcccagtgtatggatgaagtcaacagctactcctgcctctgtgctgagggctacagtggacagctctgtgagatccctccccatctgcctgcccccaagagcccctgtgaggggactgagtgccagaatggggccaactgtgtggaccagggcaacaggcctgtgtgccagtgcctcccaggcttcggtggccctgagtgtgagaagttgctcagtgtcaactttgtggatcgggacacttacctgcagttcactgacctgcaaaactggccacgggccaacatcacgttgcaggtctccacggcagaggacaatgggatccttctgtacaacggggacaacgaccacattgcagttgagctgtaccagggccatgtgcgtgtcagctacgacccaggcagctaccccagctctgccatctacagtgctgagacgatcaacgatgggcaattccacaccgttgagctggttgcctttgaccagatggtgaatctctccattgatggcgggagccccatgaccatggacaactttggcaaacattacacgctcaacagcgaggcgccactctatgtgggagggatgcccgtggatgtcaactcagctgccttccgcctgtggcagatcctcaacggcaccggcttccacggttgcatccgaaacctgtacatcaacaacgagctgcaggacttcaccaagacgcagatgaagccaggcgtggtgccaggctgcgaaccctgccgcaagctctactgcctgcatggcatctgccagcccaatgccaccccagggcccatgtgccactgcgaggctggctgggtgggcctgcactgtgaccagcccgctgacggcccctgccatggccacaagtgtgtccatgggcaatgcgtgcccctcgacgctctttcctacagctgccagtgccaggatgggtactcgggggcactgtgcaaccaggccggggccctggcagagccctgcagaggcctgcagtgcctgcatggccactgccaggcctcaggcaccaagggggcacactgtgtgtgtgaccccggcttttcgggcgagctgtgtgagcaagagtccgagtgccggggggaccctgtccgggactttcaccaggtccagaggggctatgccatctgccagaccacgcgccccctgtcatgggtggagtgccggggctcgtgcccaggccagggctgctgccagggccttcggctgaagcggaggaagttcacctttgagtgcagcgatgggacctcttttgccgaggaggtggaaaagcccaccaagtgtggctgtgccctctgcgcatagcgctgggcgtggacaggccggtgagggcgggcaaggggccccagccgctgcagcagcggagacagtcgccagcagctgggctggggtgcaggtcatcacaggacggctcctgggcagctgggccctcctgggtggggtggtgccagagcagccttttaaaagcaaattgcgccatagctgggggcagcgggggtgggcgaggcctgagctgcgggctgccctctccggaagtgccttgcacaaataggcgcttaataaatatttgttgagtgaatgtgtgcgtgaggtcaggccaagaagtgcagaacgatgacacccctccttacctgctatctgaatctggagaagaaaaatgacagccttccaaaccaacccttccctttggcctgtggcccaggctggcttggaactgggtctgtggccccagaagcctcttacccctctgcgggcaaccatgaagtactgtcagcctccccgggaagccagcctggttcattctgctgctacagaatctgctggtggtaggccaggctctggagcgggggtgccgcctcctgctggccagggagggtcggacccttgccccctgggctgactggcagctctgcagccacggcttgggaacgaggctgtgggtggaggtggttcttaggaccaggcctctgaatcctaaagttctagcatgactactgtagctgcgagggcttatgtggaggaaacagtcacaggggctgctcagggtggcagaccccactaaagagggcagagggttctttgctctagataaacaaacatcatctgcctccagacactggccacagtaggagtattggtcctgggcttccccagccaccagtcagccacaagctgtcggtgacctattggtagagggactgggtgtgagggtctgggccagggtgcttgacctgggagcagctggttcagagtccttcacaccgcaggccagtagggagcagtggaagggacagtgctccaggcattgggaagtccctgctggctctatcactcggggcaaacttctccccacctgggccttgggttcttcagctataaaatggccagaggtggggggcgggatgactaaaggaacagtgcagactcccccactgtggtcttgggaggccagaggagttagaagacctatctatctatctatctatctacattgatcacatcaaaagtatttatgtgcctaacccggggctggggattgtggacgttctggcctaatggacagatgtgaactcatcccagagcatcgcaggaatgaccaggatgcccgggaagagttgagctgagtgggggctccagccacagacagcggcccaggccagggagttgctggcaacgaaggagccagtggtggaagaagaagaggccctgaatatacgattgcctgcccacgttgtcttctcttccatacacagtgaaaatgtagaaagatggtttgtgaggccaaactgtgaatgggctaaagggaggcaaagttgcactctccttccccagagggctcaccaagagggcacacccccgggggttctggtgggcaacgggggtgagcatgtccctgccctggctccctccatctgtgaccaggaggcatggctgggtgtatgttcaggtgaggctcagagtggcattgtgtccctgtcccctgcccagggcagtgaggggagcccttgatgctgattagaaggctagaactggggtagaggtgcctggcatgtctcatgccatggggactcaatctagcaactgtgagtcctggggtccctgtgatgggaagagggcagtgccctgcccaatgtggcaggtgtcctcatggcaggatctgcccctcaccagggggctgggatctacttgcttggagctctgagcaaggccacaatgcccgcccccacccccaagtagactgcagcctgggcctcatggggcttctcccaggcccacatggcatccctctctgagtttccaggccaccgtgggaccctgcagagcatctgcaccgggctggatagggcagaaaagctcaagggcagctagcttgcctcttccctggaagaaaggtgctctgggactcaccaaccctgagaaagatagctttcctggccaccaccattccccaccaccctggagaagccaattcccaggcttgaagggcactggctggcaggaggcctcttcattctgcaggaggtggaaaggacacctgtagacaggtgatgctcacccctcacctggcgccatggggctgggaggtgagcggctggcatgtttgttcctagggagcaccatgtgagcttaaggctcccctgaccggccccaccacatggcccagcctcctagcacagcagcgctgacctcagtgcagtctgaggattggaatccaccatgagatgatgtgagagctgtgtgccccaggatcaactttttctccaacttggccatcagccagcgagttgctaaggacctgagtcagcactcacgttgcctattcacactccgcttgaaagtccggaaggtggctactgcaaaatcacccctctgagaagtcctctctccacatcttgtccccctttgtgaagacccctagttcgctctgcattttaggcatgaagagatacagcagggtgcgtccggagggagctgtggccttgcaacaccactggcaacagggccggggctcccggtgaaggtgtcaggaagtggaaaaggctggactttgtctcctctttgcctgctggtagcctaaccgcaaaagtatctctttatacagaatacttacagattctaatatatatttgtatttcattttgttacagtatttttatatgttaaagtcaacatccagcgtcttgttttgcctttcagatgctatgtggtcgtggcacgttttgttgggggtttctgtagtcgtcttgtttggatcaactcctagaggctggtttagaacaggcccatgagggagctgcacctgccctggaagtattgttttagactatgtcgatattgtctgttgtcttccatgtgaacatgacattgagtcactctgcaaaaaaaaaaaaaaaaaa

SEQ ID NO: 696 - DNA, 2732 bp, HOMO SAPIENS
cacacctttccaaggacccccaaactctgctccgtgcacgtcaaatgctcctttcccttgtgtccaaccccctacccctctccctaacacccctcttctcaacaagactcagcctctccccgaggtgggtgagcatccttgaggtttcccacccttaactgctgtgtccccggatggagccagagaaatgtggtgggggggccggggcagagtttcaacattgccccccagaaggaggagccagagatggggtctgtccaggaaaacaggatgccggagcccaggagtcgtcagcctagcagttgcctggcctccagatgcctcccaggggagcagatcctagcatgggccccaggggtgaggaagggcctggaaccagaattgtctggaaccctgatctgtaccaactttagggtcaccttccagccctgtggatggcagtggaatcaggacactcccttgaacagtgaatacgattttgccctggtcaacattggacgattagaggctgtgagcggcttgtcccgagtccagctcctccgtccagggtccctgcataaatttatccctgaggagattctgattcatggccgagacttccggctgctcagagttggttttgaggctggaggcctagagcctcaggcttttcaggtgaccatggccattgtccaagccagagctcagagcaatcaagcccaacagtattcggggataaccctgagcaaggctggccagggttctggctccagaaaaccaccaattcctctcatggagacagcggaagactgggagactgagcggaagaagcaggcagccagaggctggagggtcagcacggtcaacgagaggttcgacgtagccaccaggctccggtgtttctcctcttccttgattgtgtctggcagctcctccagcagtttccagctgattttgaattctctgagtttttccttcttgctcttcatgacagtgtcagggttcctgacacccttaccttcctgagaaataccccctgggagcgcggaaagcagagcggacaggtcagtgacttctatttttgactcgtgtttttttttccattgagatgtactctctgaagtttggtcttgatttgttttatgagaagtgaggtctgtgagtggggagggggagatttattctcattttcaggacgagacttttgccctacatctttcctagaataagaggtgagaatctcatgatttgtctctagatgtgggaggattgtgtgtaaccatcctttttcttgcttcctctgtccagttaaactcctatacacaagtctacaccccaggatactccagcctccagctgggaactcttttaacctgcagctgtctgtctgggactgggatttacgttatagcaatgcacagatactacaattccagaatcctggctatgacccagaacactgtccagattcctggctccctagaccacagccaagcttcatggttcctggaccccccagttttgtgtggctcttctctagaggagcattgacccccctgaatcagctctgtccttggcgggacagtccttccctgctggcagtctcttctcgttggctccctcgacctgctatctcctctgaaagctggctgaccaggaatggggtctcccctcacattggggagcttgccctttacctccagggctgctgctgcctgggtatctgggaccccagatcaggctctggagacgctgctacctgaggggaaggcctgaggtccaggtaagaagggaaaatagactgggagtgggacaagggacttgactctgctgaaccagatgaacaggagctggaaaggcaaggagctgaagcctctgggagtctgggaagtgaagttctactcctcttggcatcaaacaaggtttgggagtgtaggaggtgcgggaaagtgcttgtggcttagattaagtggaatttagggcatagctgaaaggggaaacagaattaaagacaccagaagtagcagagaagcagggggccagagctacaacagtattcttctctgttcctctttgcctcctccccagatgggcctctcatctcccacaatctctggcctccaggatgagctatcccatcttcaggagttattacggaaaggacaccaagaatatctcctgaggatcactccaagaaaagagatccacataccattctcaatcccactgaaattgctggcattctcaaaggcagggcagagggggatctggggtagagggagggttctgtctaatcttttttttttcttttgtatctgcacttgcagcctcagctttcatacttcagcccttaagttcactaagaaggtctgagtttctgctgcagatagtggtgttaactgctccaactcttgtcttgcttagtttctacaaatatttttgcttcttgtcatttgaaggattaagaaacaaaaacaatccagaaattgatcggtttttttaggccaatcccatcccttctggataaccagatgttaaatcatgagatcagagatgctgttcatcagtcccaacaagatggcctagaaatcgcattctcacctcgccttgctgctgctttaattccaagttctatttcttcccttatagttttctatgggaatgaggcggatacaggaaacaccctatctcctctgtatttttgtagtggaatttctatttaaggggctcattaaagcatagtatttatacac

SEQ ID NO: 697 - DNA, 3686 bp, HOMO SAPIENS
ttcagaggctgcgtctttcaggaggccagccaccattggttcaggcaatcttcagcggtgatccagaggagatccggatgctcatccataaaactgaagatgtgaatactctggattctgagaaacgaacccctcttcatgtggccgcatttctgggagatgcagagatcattgaactcctgattttgtcaggagctcgtgtaaatgccaaggacaacatgtggctgactccactgcaccgggctgttgcttccagaagtgaagaagcagtacaggttttgattaagcactcagctgatgtcaatgcaagggacaagaactggcagacccctcttcatgtggcagcagccaacaaggctgtcaaatgtgcagaagtgatcattcccctgctgagcagtgtcaatgtctccgaccgaggggggcgcacagccttgcaccatgcggctctgaacggccacgtggagatggtcaatttactcttggccaaaggggcaaatatcaatgcatttgacaagaaggaccggcgtgctctgcactgggcagcatacatgggccacttggatgttgtagcattgctcattaaccatggcgcagaagtgacctgtaaggataagaagggttatacccctctgcatgctgcagcctccaatggacagattaatgttgtcaagcatctcctgaacctgggggtggagattgatgaaatcaatgtctatggaaatacagcgcttcacatcgcctgctacaatggacaggatgctgtggttaacgagttgattgactacggtgctaacgtgaaccagccaaacaataatgggttcacccctttgcattttgctgctgcctccactcatggtgctttgtgtcttgaattgttagtaaacaacggggcagatgttaacattcagagtaaagatggcaaaagtccactgcacatgacagctgtccatggaaggttcacacggtcacagaccctcattcagaatggaggtgaaattgactgtgtggataaggacggcaacactcctctccatgtggctgcaagatacggtcatgagcttttgattaacaccttaagaaccagcggagctgacacagccaagtgtggaatccatagcatgttccctttacatttagctgccctaaatgctcactctgactgctgcagaaagttgttatcatcgggctttgaaatagacaccccagataaatttggaagaacgtgccttcatgctgctgctgcaggaggtaatgtggaatgtataaaactcttgcagagcagcggagcagatttccataaaaaggacaagtgtgggaggacccctttgcactatgcagctgcgaattgtcatttccactgtattgagacattagtgaccacaggggccaacgttaatgaaacagatgactggggacgcacagctttgcattacgccgctgcatcagacatggatagaaataagactatcttaggaaatgcccatgataattcagaagaacttgaaagagccagggagctgaaggaaaaggaagccacactatgtctagagtttctgcttcaaaatgatgcaaatccatctatccgggacaaggaaggttacaatagcatacattatgctgccgcctatgggcacaggcagtgtctggaattgcttttggaaagaacaaacagtggatttgaagaatcagattctggtgctactaagagtccactccacttagctgcctacaatgggcaccatcaagccttggaagtccttctgcagtcgttggtggacctggacatcagggatgagaaaggccgcactgctctggatctggctgcctttaaaggacacacagaatgtgtggaagcgcttatcaatccgggcgcatccatctttgtgaaagacaatgtaaccaaaagaaccccacttcatgcctcagtaattaatggtcacacactgtgtttacggctgttgctagaaattgcagacaacccggaggcggtcgatgtgaaagatgccaaaggacaaacaccactgatgcttgcagtagcatatggacatattgacgctgtttcattgttacttgaaaaggaagccaacgtagacactgttgacatcctaggatgcacagctttacacagagggattatgacaggacacgaggaatgtgtgcaaatgctgctggaacaagaagtgtcaattctctgtaaagattccagagggaggacgcccttgcactatgcagctgctcgtggccacgccacgtggctgagcgagctgctccaaatggctctttctgaggaggactgttgtttcaaagataaccaaggctacacgccgctgcactgggcttgttacaatggtaatgaaaactgtatagaggtacttttggagcaaaaatgttttcgcaaatttatcggtaatccctttactccactgcactgtgcaataatcaatgatcatgggaattgtgcatcattgctgcttggggccatagattccagtatcgtcagttgtagagatgacaaaggcaggacaccccttcgtgcggcagcatttgctgatcatgtggagtgcttgcagcttcttctgagacacagtgctccagtgaacgcagtagataattcagggaaaacagcactgatgatggctgctgagaatgggcaggcaggcgctgtggatattttggtgaacagtgcccaggctgatctgactgtaaaggataaggacttgaatacacccttacatttggcttgtagtaaaggtcatgaaaaatgtgccttgttaatacttgacaagatacaagacgagagccttattaatgaaaaaaataatgcactgcagacgtaagtgtaactactaaagttggacttgaacccagggtcatagtcatttattcaataagtattaagagcctgctgtgtgccagactagctctggggagcacagtggtgaaagatgcagtcctggcttcccctgcatgaaggtgacagtcacatacctacaagtgctgaccaagctgggcagttttagttagaatcctccttttgatatgtcttcatttaattttgtgaagtctctgtttttctttgctgatatttctggggtaatattataaatttagtgggctgttagaaaaattttatggactgacatatttggggaaactatttgtattatgtattagcattatgtattctgactggaaaatgacagttttgcaaatcaggttcccagaatacatttgaagagtttctaagctatttgtcttgattatattttaatataattcagtgtaacccttggtgtgaaagatctaaaagctgtttcattttccgctttaggaaattatttatgcatttgttttaaaggcaaaggaatttttttcatttaagattcttaagccgggcgtggtggctcatgcctttaatcccagcactttgggaggccgaggcagttggattacttgaggccaggagttcatgacccgcctggccaacatggtgaaaccccgtctctactaaaaatacaacaacaacaaaattagctgggcatgatggtgggtgcctgtaacctcagctacttgggaggctgaggcaggagaatcacttgaacctgggaggtggaggttgctgtgagctgagatcgtgccactgcaccactccagcctgggcaacaagagcgagactgtccccccac

SEQ ID NO: 698 - DNA, 2700 bp, HOMO SAPIENS
gcggcgcctagtcccgggctggcgggagtgcagttctgagtcccgcccggcgtgcgcggagcggggcagccagcagcggaggcgcggcgcgcagcacacccggggaccatgggctccatgttccggagcgaggaggtggccctggtccagctctttctgcccacagcggctgcctacacctgcgtgagtcggctgggcgagctgggcctcgtggagttcagagacctcaacgcctcggtgagcgccttccagagacgctttgtggttgatgttcggcgctgtgaggagctggagaagaccttcaccttcctgcaggaggaggtgcggcgggctgggctggtcctgcccccgccaaaggggaggctgccggcacccccaccccgggacctgctgcgcatccaggaggagacggagcgcctggcccaggagctgcgggatgtgcggggcaaccagcaggccctgcgggcccagctgcaccagctgcagctccacgccgccgtgctacgccagggccatgaacctcagctggcagccgcccacacagatggggcctcagagaggacgcccctgctccaggcccccggggggccgcaccaggacctgagggtcaactttgtggcaggtgccgtggagccccacaaggcccctgccctagagcgcctgctctggagggcctgccgcggcttcctcattgccagcttcagggagctggagcagccgctggagcaccccgtgacgggcgagccagccacgtggatgaccttcctcatctcctactggggtgagcagatcggacagaagatccgcaagatcacggactgcttccactgccacgtcttcccgtttctgcagcaggaggaggcccgcctcggggccctgcagcagctgcaacagcagagccaggagctgcaggaggtcctcggggagacagagcggttcctgagccaggtgctaggccgggtgctgcagctgctgccgccagggcaggtgcaggtccacaagatgaaggccgtgtacctggccctgaaccagtgcagcgtgagcaccacgcacaagtgcctcattgccgaggcctggtgctctgtgcgagacctgcccgccctgcaggaggccctgcgggacagctcgatggaggagggagtgagtgccgtggctcaccgcatcccctgccgggacatgccccccacactcatccgcaccaaccgcttcacggccagcttccagggcatcgtggatgcctacggcgtgggccgctaccaggaggtcaaccccgctccctacaccatcatcaccttccccttcctgtttgctgtgatgttcggggatgtgggccacgggctgctcatgttcctcttcgccctggccatggtccttgcggagaaccgaccggctgtgaaggccgcgcagaacgagatctggcagactttcttcaggggccgctacctgctcctgcttatgggcctgttctccatctacaccggcttcatctacaacgagtgcttcagtcgcgccaccagcatcttcccctcgggctggagtgtggccgccatggccaaccagtctggctggagtgatgcattcctggcccagcacacgatgcttaccctggatcccaacgtcaccggtgtcttcctgggaccctacccctttggcatcgatcctatttggagcctggctgccaaccacttgagcttcctcaactccttcaagatgaagatgtccgtcatcctgggcgtcgtgcacatggcctttggggtggtcctcggagtcttcaaccacgtgcactttggccagaggcaccggctgctgctggagacgctgccggagctcaccttcctgctgggactcttcggttacctcgtgttcctagtcatctacaagtggctgtgtgtctgggctgccagggccgcctcggcccccagcatcctcatccacttcatcaacatgttcctcttctcccacagccccagcaacaggctgctctacccccggcaggaggtggtccaggccacgctggtggtcctggccttggccatggtgcccatcctgctgcttggcacacccctgcacctgctgcaccgccaccgccgccgcctgcggaggaggcccgctgaccgacaggaggaaaacaaggccgggttgctggacctgcctgacgcatctgtgaatggctggagctccgatgaggaaaaggcagggggcctggatgatgaagaggaggccgagctcgtcccctccgaggtgctcatgcaccaggccatccacaccatcgagttctgcctgggctgcgtctccaacaccgcctcctacctgcgcctgtgggccctgagcctggcccacgcccagctgtccgaggttctgtgggccatggtgatgcgcataggcctgggcctgggccgggaggtgggcgtggcggctgtggtgctggtccccatctttgccgcctttgccgtgatgaccgtggctatcctgctggtgatggagggactctcagccttcctgcacgccctgcggctgcactgggtggaattccagaacaagttctactcaggcacgggctacaagctgagtcccttcaccttcgctgccacagatgactagggcccactgcaggtcctgccagacctccttcctgacctctgaggcaggagaggaataaagacggtccgccctggcagtgaaaaaaaaaaaaaaaaaaaa

SEQ ID NO: 699 - DNA, 4948 bp, HOMO SAPIENS
agtgcgcggtcgctccgcgcctgcgcaggagaggtggtaggctcgggtggctggctccggggagatagcgcctgtcagtcggtgggtcggtcctcgcgccggccctccccctccccggtctccgggggaggcgcggtggagtccgcccccggggttctccgatgggggagaagcggcgacggcggcagtggagtaaccgagccggagcgtgagcggccccggtgccccgttccccacggaggccatgggcgacccagcccccgcccgcagcctggacgacatcgacctgtccgccctgcgggaccctgctgggatctttgagcttgtggaggtggtcggcaatggaacctacggacaggtgtacaagggtcggcatgtcaagacggggcagctggctgccatcaaggtcatggatgtcacggaggacgaggaggaagagatcaaacaggagatcaacatgctgaaaaagtactctcaccaccgcaacatcgccacctactacggagccttcatcaagaagagccccccgggaaacgatgaccagctctggctggtgatggagttctgtggtgctggttcagtgactgacctggtaaagaacacaaaaggcaacgccctgaaggaggactgtatcgcctatatctgcagggagatcctcaggggtctggcccatctccatgcccacaaggtgatccatcgagacatcaaggggcagaatgtgctgctgacagagaatgctgaggtcaagctagtggattttggggtgagtgctcagctggaccgcaccgtgggcagacggaacactttcattgggactccctactggatggctccagaggtcatcgcctgtgatgagaaccctgatgccacctatgattacaggagtgatatttggtctctaggaatcacagccatcgagatggcagagggagccccccctctgtgtgacatgcaccccatgcgagccctcttcctcattcctcggaaccctccgcccaggctcaagtccaagaagtggtctaagaagttcattgacttcattgacacatgtctcatcaagacttacctgagccgcccacccacggagcagctactgaagtttcccttcatccgggaccagcccacggagcggcaggtccgcatccagcttaaggaccacattgaccgatcccggaagaagcggggtgagaaagaggagacagaatatgagtacagcggcagcgaggaggaagatgacagccatggagaggaaggagagccaagctccatcatgaacgtgcctggagagtcgactctacgccgggagtttctccggctccagcaggaaaataagagcaactcagaggctttaaaacagcagcagcagctgcagcagcagcagcagcgagaccccgaggcacacatcaaacacctgctgcaccagcggcagcggcgcatagaggagcagaaggaggagcggcgccgcgtggaggagcaacagcggcgggagcgggagcagcggaagctgcaggagaaggagcagcagcggcggctggaggacatgcaggctctgcggcgggaggaggagcggcggcaggcggagcgcgagcaggaatacaagcggaagcagctggaggagcagcggcagtcagaacgtctccagaggcagctgcagcaggagcatgcctacctcaagtccctgcagcagcagcaacagcagcagcagcttcagaaacagcagcagcagcagctcctgcctggggacaggaagcccctgtaccattatggtcggggcatgaatcccgctgacaaaccagcctgggcccgagaggtagaagagagaacaaggatgaacaagcagcagaactctcccttggccaagagcaagccaggcagcacggggcctgagccccccatcccccaggcctccccagggcccccaggacccctttcccagactcctcctatgcagaggccggtggagccccaggagggaccgcacaagagcctggtggcacaccgggtcccactgaagccatatgcagcacctgtaccccgatcccagtccctgcaggaccagcccacccgaaacctggctgccttcccagcctcccatgaccccgaccctgccatccccgcacccactgccacgcccagtgcccgaggagctgtcatccgccagaattcagaccccacctctgaaggacctggccccagcccgaatcccccagcctgggtccgcccagataacgaggccccacccaaggtgcctcagaggacctcatctatcgccactgcccttaacaccagtggggccggagggtcccggccagcccaggcagtccgtgccagtaaccccgacctcaggaggagcgaccctggctgggaacgctcggacagcgtccttccagcctctcacgggcacctcccccaggctggctcactggagcggaaccgcgtgggagtctcctccaaaccggacagctcccctgtgctctcccctgggaataaagccaagcccgacgaccaccgctcacggccaggccggcccgcaagctataagcgagcaattggtgaggactttgtgttgctgaaagagcggactctggacgaggcccctcggcctcccaagaaggccatggactactcgtcgtccagcgaggaggtggaaagcagtgaggacgacgaggaggaaggcgaaggcgggccagcagaggggagcagagatacccctgggggccgcagcgatggggatacagacagcgtcagcaccatggtggtccacgacgtcgaggagatcaccgggacccagcccccatacgggggcggcaccatggtggtccagcgcacccctgaagaggagcggaacctgctgcatgctgacagcaatgggtacacaaacctgcctgacgtggtccagcccagccactcacccaccgagaacagcaaaggccaaagcccaccctcgaaggatgggagtggtgactaccagtctcgtgggctggtaaaggcccctggcaagagctcgttcacgatgtttgtggatctagggatctaccagcctggaggcagtggggacagcatccccatcacagccctagtgggtggagagggcactcggctcgaccagctgcagtacgacgtgaggaagggttctgtggtcaacgtgaatcccaccaacacccgggcccacagtgagacccctgagatccggaagtacaagaagcgattcaactccgagatcctctgtgcagccctttggggggtcaacctgctggtgggcacggagaacgggctgatgttgctggaccgaagtgggcagggcaaggtgtatggactcattgggcggcgacgcttccagcagatggatgtgctggaggggctcaacctgctcatcaccatctcagggaaaaggaacaaactgcgggtgtattacctgtcctggctccggaacaagattctgcacaatgacccagaagtggagaagaagcagggctggaccaccgtgggggacatggagggctgcgggcactaccgtgttgtgaaatacgagcggattaagttcctggtcatcgccctcaagagctccgtggaggtgtatgcctgggcccccaaaccctaccacaaattcatggccttcaagtcctttgccgacctcccccaccgccctctgctggtcgacctgacagtagaggaggggcagcggctcaaggtcatctatggctccagtgctggcttccatgctgtggatgtcgactcggggaacagctatgacatctacatccctgtgcacatccagagccagatcacgccccatgccatcatcttcctccccaacaccgacggcatggagatgctgctgtgctacgaggacgagggtgtctacgtcaacacgtacgggcgcatcattaaggatgtggtgctgcagtggggggagatgcctacttctgtggcctacatctgctccaaccagataatgggctggggtgagaaagccattgagatccgctctgtggagacgggccacctcgacggggtcttcatgcacaaacgagctcagaggctcaagttcctgtgtgagcggaatgacaaggtgttttttgcctcagtccgctctgggggcagcagccaagtttacttcatgactctgaaccgtaactgcatcatgaactggtgacggggccctgggctggggctgtcccacactggacccagctctccccctgcagccaggcttcccgggccgcccctctttcccctccctgggcttttgcttttactggtttgatttcactggagcctgctgggaacgtgacctctgacccctgatgctttcgtgatcacgtgaccatcctcttccccaacatgtcctcttcccaaaactgtgcctgtccccagcttctggggagggacacagcttccccttcccaggaattgagtgggcctagcccctccccccttttctccatttgagaggagagtgcttggggcttgaaccccttaccccactgctgctgactgggcagggccctggacccctttatttgcacgtcaggggagccggctccccccttgaatgtaccagaccctggggggggtcactgggccctagatttttggggggtcaccagccactccaggggcagggaccatttcttcattttctgaaagcactttaatgattccccttcccccaaactccagggaatggaggggggaccccgccagccaaaacattccccccattcccgacccccctctcctcttctagcccatgcccttccccggtggagggagggagcagggagccctcactctccacgccccttgcttgcatctgtatatagtgtgagcagcaagtaacccttctccctccccccccacccctcctcaatgtagtggccttggatatcctgtttgttaataaagacaattcaaccagctcccaccaaaaaaaaaaaaaaaaaaa

SEQ ID NO: 700 - DNA, 4684 bp, HOMO SAPIENS
ggcagaccgtcacgtgacgacgtcgattcgcgtgcggcagtggcgaagttgacaaaccccgcgaaaatcgactctttgcatcgcacattttgttgattttccctcgtttttctttctctctttcccccgtccatccgaaagagggttggaaaaaaacaaaacaaacaaacaaacaaaaaaaaaacctaacgctgttgggacccggaagcggaaagggcatctttgaggtcgatacttccgggtcattgggagagtgcgggattcctgggccgagagcgggtggctgagccgggacctcgcgtgattctcggaacccgaggagaagcggcgtccggggctatggctgtgactctggacaaagacgcttattatcggcgagtgaagagactgtacagcaattggcggaaaggagaagatgagtatgccaacgttgatgccattgttgtatcagtgggtgttgatgaagaaattgtttatgccaaatcaactgccttacagacatggctctttggttatgaactaactgatactatcatggtcttttgtgatgacaaaatcatctttatggccagcaagaaaaaagtggagttcttgaaacagattgccaacactaagggcaatgagaatgctaatggagcccctgccatcacactgctaatacgagaaaagaatgaaagtaataagagtagctttgacaaaatgattgaagccattaaagaaagcaagaatggcaagaagattggagtgttcagcaaagacaaattccctggagagttcatgaagagctggaatgactgcctcaacaaagaaggctttgacaaaatagatatcagtgcagttgtggcatataccatcgctgtaaaggaggatggggagctcaacctaatgaagaaagcagccagcatcacttctgaagtcttcaacaaattcttcaaggaaagagtcatggaaatagttgatgcagatgagaaagttcgacacagcaaactggctgagtctgtggaaaaggccattgaagagaaaaaataccttgctggggcagacccttctactgtggaaatgtgttaccctcctatcattcagagtggtggcaactataatctcaagttcagtgtggtgagtgacaagaatcatatgcactttggggctatcacttgtgccatgggtattcgcttcaagtcttactgctccaaccttgttcgcactttgatggttgatccttctcaagaagttcaagaaaattataactttttgctccagcttcaagaggagctgctgaaggaattaagacatggtgtgaagatatgtgacgtgtataacgctgtcatggacgtggttaaaaagcagaagccagaactgctgaacaaaattaccaaaaacctagggtttgggatgggaattgaattccgtgaaggctccctagtaatcaatagcaaaaatcaatacaaactgaagaaaggaatggttttcagcatcaatttaggattctcagacctgactaacaaggaggggaaaaagccagaagagaaaacctatgccctgttcattggtgacacagtgcttgtggatgaggatggcccagctactgttctcacttctgtgaagaagaaagtgaagaatgtggggattttcctaaagaatgaagatgaggaagaagaggaggaggagaaagatgaggcagaggaccttttgggaagaggttctcgggcagcattacttacagaaagaacaagaaatgaaatgactgcagaagagaagcgaagagcacatcagaaagaactagcggctcaactcaatgaagaagcaaagaggcgattgactgaacaaaagggagaacagcagattcagaaagctcgcaagtctaatgtgtcctataaaaacccatctctgatgcctaaggaaccacatattcgggaaatgaagatctacatcgataagaaatatgagactgtaataatgcccgtgtttggcattgcaacaccgtttcacattgccacaatcaagaatataagtatgtccgtggaaggagattatacttacttgcgaatcaacttttattgcccaggcagtgctctgggcaggaatgaaggcaacatctttcctaaccctgaagcgacttttgtcaaggaaattacataccgagcatcaaatattaaggcacccggagaacagacagtaccagccttgaaccttcagaatgctttccgaattattaaagaagtacagaaacgttataaaactcgagaagctgaagagaaagagaaggaggggattgtaaaacaagactcactggtgatcaatctaaaccggagtaatccgaaactgaaagatctatacattcgcccaaatattgcccaaaagaggatgcaaggctcactggaggcccatgtcaatggcttccgcttcacatctgttcgaggagacaaagtggatattttgtacaataatattaagcatgctttgttccagccctgtgatggagaaatgattattgtcttgcactttcacctcaagaatgccatcatgtttgggaagaagcggcacacggatgtgcagttctacacagaagtgggagagataaccacggacttggggaaacatcagcatatgcatgaccgagatgacctctatgctgagcagatggaacgagaaatgaggcacaaactgaaaacagcctttaaaaatttcattgagaaagtagaggctctaactaaggaggaactggaatttgaagtgccttttagggacttgggatttaacggagctccctataggagtacctgcctccttcagcccactagtagtgcgctggtaaatgctacggaatggccaccttttgtggtgacattggatgaggtagagctgatccactttgagcgggtccagtttcacctgaagaactttgatatggtaatcgtctacaaggactacagcaagaaagtgaccatgatcaacgccattcctgtagcctctcttgaccccatcaaggaatggttgaattcctgcgacctgaaatacacagaaggagtacagtccctcaactggactaaaatcatgaagaccattgttgatgaccctgagggcttcttcgaacaaggtggctggtctttcctggagcctgagggtgaggggagtgatgctgaagaaggggattcagagtctgaaattgaagatgagacttttaatccttcagaagatgactatgaagaggaagaggaggacagtgatgaagattattcatcagaagcagaagagtcagactattctaaggagtcattgggtagtgaagaagagagtggaaaggattgggatgaactggaggaagaagcccgaaaagcggaccgagaaagtcgttacgaggaagaagaagaacaaagtcgaagtatgagccggaagaggaaggcatctgtgcacagttcgggccgtggctctaaccgtggttccagacacagctctgcaccccccaagaaaaagaggaagtaacttctgaactttggccctgagctccattcttcctccagccaacccctgaaaattttacatgacatagaaactgtatttttcctttcgttttcatttgaagttttgccatttgtgtttatgggtttagggggccatttgtgtggaccaatctactcggggaattccaggcccaccaggacacgtgccaatggccccattcagatggcaagggaggaggtgttcttgaagacaggaggaggctcccgctgttaataaatattgtttcattcttctctcttcctgtcaccttctgccaagacattgatggcttctgacatcttatttggtgtctcaaagctgtatttccaagacagtggtacaaggtgacccttaattacccgtatcatggttcttgaccagcacattcaatcctccaacctaccctactgccatgaccttccgcacatctctaagttttatctttgcaatactcaaggttctcggaaatttgctaatggttgtgataaaccatacagcttgagccagtgaggcagattgggctggtgccttcgtctgagttttcctgctttcctgcctcgtgcagattctgaggtatatctgctgccttggaagacataagaagcagtgatactccctggctcggttattttctccatacaatgcacacatggtacaatgatagaaggcaaaattgccactgtcttcttttttttctcatatatctaaggaagatatatcaggttgtgcctcatgtaccgcttctagtgaaatgtagaggaaggctcaaaggagtcaacatttatatctggaagggacaagtcatgccttgggcctagaataccctgatgagaaaagagaagaggaagggaggccatatctacaacacagcctctcggcactgctgctccttattttaactttgtcttgcattgtcctgtatttatcacagtttctgttgaacagcttttcaagtatttggggagtttatcttgccatcctccccttctggttctctgcacccacctgtcccactgcagttccttccgtgctctgtgactttaagagaagaaggggggaggggtcccggattttatgtttgtttgttttttctccttagcagtaggacttgatattttcaattttggaagaactaaaagatgaataaactgggttttttttgttgtttgtttttgtaaattca

SEQ ID NO: 701 - DNA, 1608 bp, HOMO SAPIENS
cagtgagttagcatggagggcagtgggaccggaaaaagacgtggaaaagctgcgaaaacgagccttcgaatcatggacgcgcgggcccagctcctcctccgagttcctcatccggggccgtcactcacatccggggccctcactcacatccgggaccctcatccggggctctcacccacatccgggaccctcatgcctgggcggaggagggggggccctcattcgggaccctgcactccgtcgccggaagtgccaccgagaagcgccggcctcggggctgtctacagcggcccgggagaggctgtggtggccccgagcgcgagtgtgtaggtgacaggacagcggccaggcccgcccctcccctcgtgatggtcattgtcctccagagcagtgatggaggaaataccagcccaggaagcagcagggtcaccaagggtccagtttcagtctttggagacccagtctgagtgtctgtccccagagcctcagtttgtgcaggacaccgacatggaacagggactcactggggctccacctgttcctcaggtgcctgctcttccccgtgagggaagcccaggagaccaggcagctgcgctcttgacagccaggtaccaggagtttgtgacattcgaggatgtggctgtgcaccttactcgagaggaatggggatacctggaccctgttcagagggacctctacagagaagtgatgttagagaattatgggaacgtggtctcactgggcatacttctccgccttcccaccacccggattcatagtgtgaattcctgcccggccctgagtcatacccaggcaagtgctttctctggagaaacacttgccgtccttacagcaggaatctccaagagatggcccaagtatcggcttcccatcgatattgctcgtccctgctcggaaactccttttccacgattgtgagatattaaaattgactgatggaatagaagctccccaggatgccaccactgtgtaaaatcgcagctcctcaaattacctctgtttaatttcaaatgttagggtccaaggaagccctctgttgcaaccagatatgttttgaacccagttcattcagaaaccatggttggtggtcatcatctacttgtattgtgaaaaaccagaaattccaaattcagctcttcagttatggtcttttcatattattttagaatgtgaaacttatgctgtgtgcccctccttttatgtggcgaacacaacctgccccgtatggtgcctaactctcctgtgaaccctgggcttccctcatgtttaacattctggtttcctccttccttgaagtccctgtggccctcttcaaggtcctaccttcctaccctttattctttgtggttctgtacagattgatgcaattatattgcctttcctgattaagtgttccttactctgtccttgatggaggggagaagggagggcaaagaagttaaatttatttcagggcatcaaattgaatatctacttaataactttgtaaactgtaaagtgacatacatataattgtaaagtactgttaattttatctaataattacagagtttccaacagttaaaaaaaaaaaaaaaaaaaaaaaaa

SEQ ID NO: 702 - DNA, 1172 bp, HOMO SAPIENS
gcgagccaggggcctcgctgcgggttcaagtgcgtccgggtttggacgtcgcggctccaggagtgtgctctctctcctgcccatcccctccccggagttcagcgcatccggggccccggggacccctcttcccggccctgctggccgcgcttgcccgcccgcatggggccgaggttcctggccgacgcgcgagggcgcgggcgggtaccgggttccggtttttcccaggccccgatccccgcccacgcacgaggcccccggcccacgcacgaggcgcccacgcccatcgtggaggctccgcctggaaaagaagtccgacttcctctccaagctgctccgaggggaatggggaatcggcaggaaatgacccgaactgccagcctgcgcctttgcagccggccctcgctttgctgaagacgagcagctcccaccaaagtcttgcctccccttaccccgaaagccccgctcagttcaatatttcaagtgaaaatctgcctgttcgaaaagaaaatattcacaaatgagcagtgtattagaagacaactgaattgcttctaagaatgggtctcactctgccatcacccaggctggagtgtggtggcaccatcatggctcactgcagccttgaactcctgagctcaagtcatcctcccacctcagccttccgagtagctggaactgcaggtgtgagccaccatgcctggctgatttgtctttttaaattttttatagagaccgagtctcaactatattgtccaggctggaaaagaacttctttccctccaagtgataaccttttccagacaagtcagcttaaaaactgacccaaaggccctgaagtacacagttttcttggagaaagaaaaaaataagtgaaaaggacttgctgacttgctaattcattttggggcctgtgggtaacatcagaatggcaaagcacttggggcttttttctaatttgtatttttttaatcttctgagaaatgacttttatatgccaagattcattccatgattagtttttatgaccaagttatgaacgcttttgaatatggggacctagaatagaaatgctaacctacctgcaaggagagctctgtgattggcatccccatcatgctgtaactgacacaaaataaacttagggtaattgccgaaaaaaaaaaaaaaaa

SEQ ID NO: 703 - DNA, 3704 bp, HOMO SAPIENS
attaagggggagggggccgaagaggaggggcggagggccgggctgcagttacggcggctgaagagagacagcccaagccggtcggggtgggggcgcgagagcgaaggctgcggggagcggcgctgggaccggtgcgggcagcggggaggggagcggcggccgaggcaaagggccgccgagcggcggaggcaccgagtgcagagcattgtagaccaaggagccatggataggagaagtatgggtgaaacagaaagtggagatgctttccttgacctgaagaagcctcctgcctccaaatgcccccatcgctatacaaaagaagaactcttggatataaaagaactcccccattccaaacagaggccttcatgcctttctgaaaaatatgacagtgatggtgtctgggaccctgagaagtggcatgcctctctctacccagcttcagggcggagctcaccagtggaaagtctgaagaaagagttggatacagaccggccttccctggtgcgcaggatagtagatccacgagagcgtgtgaaagaagatgacttagatgttgttctcagccctcagagacggagctttggagggggctgccacgtgacagccgctgttagctcccggcgctcaggaagtccattagagaaagatagtgatgggcttcgtctgcttggtggacgtaggattggcagtgggaggataatctctgcccggacctttgagaaggatcaccgtcttagcgataaggacctgcgggacttgagagacagagaccgagagagggacttcaaggacaagcgtttcaggagagagtttggagatagtaagcgtgtctttggtgagcgtagaagaaatgattcttacacagaagaagaaccagagtggttctctgctggacccacaagtcagtctgaaaccatcgaactgactggctttgatgataagatactagaagaagatcacaaagggagaaaaagaacaaggcgacggacagcctctgtgaaggaaggtatagtagagtgcaatggaggagtggccgaagaggatgaagtggaggtcatccttgcacaggagcctgcggctgatcaggaagtgccaagggatgctgtcttgcctgagcagtccccaggagactttgactttaatgagttctttaaccttgataaggtgccatgcttggcttcgatgatagaagatgttttgggagaagggtcagtctctgccagtcggttcagtaggtggttctctaacccgagcagatcaggaagccgatccagcagtcttgggtcaacaccacatgaagagctagagagacttgcaggtctggagcaagccatcctctctcctggacagaactcggggaattactttgctcctataccattggaagaccatgctgaaaataaagtggatattttagaaatgctacagaaagccaaagtggatttgaaacctcttctttccagcctttctgcaaataaagaaaaacttaaagaaagctcacattcaggggttgtgctttcagtggaggaggtagaagcaggtctgaagggcttgaaggttgaccagcaagtgaagaattcaactcccttcatggcagaacacctagaagagaccttgagtgccgtaaccaacaatcgacaactgaagaaagacggagacatgactgcgttcaacaagctagtgagcacaatgaaggcaagtgggactttgccttctcagcccaaagtcagccgaaaccttgaaagccatttgatgtcccctgctgagattccaggccagcctgtccctaagaacatcctgcaggaacttctgggtcaaccagttcagagacctgcttcttccaatcttctgagtggccttatggggagcttggagcctacaacatctttactgggccaaagagcaccctctcctcccttgtcacaggtgtttcaaactcgagcagcctcagctgactaccttcgcccaagaataccatcaccaattggtttcacaccaggaccacagcagctactcggagatccattccaaggcatgcgcaaacccatgagccccatcacagcccagatgagccagctggagttgcaacaggcagctttagaagggctggccttgccacatgaccttgctgtacaggcagcaaacttctaccagcctggttttggcaaaccacaggtggacagaaccagagatggattcagaaacaggcaacagcgagtgaccaagtcaccagcacccgtgcatcgagggaattcctcttcccctgcccctgctgcctccatcacaagcatgctttctccttcctttacccctacctcagtgattcgtaagatgtacgagagcaaagagaaaagcaaggaggagccagcatctggaaaagcagctcttggtgacagtaaagaggatactcagaaggccagtgaagaaaacctcctgtcatccagctctgtacccagtgccgatcgagactcttctcccactacaaattccaaactgtcagcattacagaggtcttcgtgttccaccccactgtcccaggccaaccgttacaccaaagaacaagattatcgacctaaagcaactgggagaaaaacacccaccttggcatccccagttcctacaacaccttttctccgccctgtccaccaagttccccttgtcccccatgtccctatggttaggcctgctcaccagcttcacccagggttggtacagaggatgctggcccagggagtacatccacagcatcttccaagtttgctccaaactggtgtgcttcctcctgggatggacttgagtcatttacagggaatatctggccccatcctgggtcagcccttttaccctttacctgctgctagtcaccctctcttaaaccctcgtcctggaacacctctgcatctggcaatggtgcaacagcagctacagcgctcagttctgcatcctccaggctctggttcccatgcagcagctgtcagcgttcagacaacccctcagaacgtgcccagccggtcaggcctgccccacatgcactcccagctggagcatcgccccagccagaggagcagctcccctgtgggccttgccaaatggtttggctcagatgtgctacagcaacccctgccctccatgcccgccaaagttatcagtgtagatgaattggaataccgacagtgagcagggcaggcagactcaactaagcccggacctgtggtggcacactgggcaggaccctgcttcatctcgggttggtttatgggcttttactttggagcactctgtgtgaagctgtttggtggaacccatgcatctggtgtggtccgcattatgatggaaggatcttaaccagtcgagtggagtgtacattgtctgaatacaggatgcacaatgttgtcaatcctggaaatggtctttcttttttgtaagatatgtgaatgaagtgttggtgtcctcaccaagaggtggcacctaagggttctgaggaaataaatgtatagacccttatgtacagacctgtgtataaacaacttttgtatatacatataggatagcttttttgaactatacagctgtacataaaagtagctgatattagttaggcctgtgtcaacagtttggatttttttcacttgtacatttgggattttcttttggttgattaaaattgcatatgctaagtgtgtgaatgaagtaactgaaaa

SEQ ID NO: 704 - DNA, 3349 bp, HOMO SAPIENS
agttggtgtcatgcaagaatctattcacactgactaaagatattggaagagtgaagatcagagaattttaagtctgaaatttggcatcactgccctgaacaatataaccttagttggcataaactactcatacagacaaaggcattatccatcacaataagtaactttttgtctttatttcaaccggacaatcgtgattagaaaagctcctgtgacaaaattcaagaaaacctgacataaatgaacaacaatacaacatgtattcaaccatctatgatctcttccatggctttaccaatcatttacatcctcctttgtattgttggtgtttttggaaacactctctctcaatggatatttttaacaaaaataggtaaaaaaacatcaacgcacatctacctgtcacaccttgtgactgcaaacttacttgtgtgcagtgccatgcctttcatgagtatctatttcctgaaaggtttccaatgggaatatcaatctgctcaatgcagagtggtcaattttctgggaactctatccatgcatgcaagtatgtttgtcagtctcttaattttaagttggattgccataagccgctatgctaccttaatgcaaaaggattcctcgcaagagactacttcatgctatgagaaaatattttatggccatttactgaaaaaatttcgccagcccaactttgctagaaaactatgcatttacatatggggagttgtactgggcataatcattccagttaccgtatactactcagtcatagaggctacagaaggagaagagagcctatgctacaatcggcagatggaactaggagccatgatctctcagattgcaggtctcattggaaccacatttattggattttcctttttagtagtactaacatcatactactcttttgtaagccatctgagaaaaataagaacctgtacgtccattatggagaaagatttgacttacagttctgtgaaaagacatcttttggtcatccagattctactaatagtttgcttccttccttatagtatttttaaacccattttttatgttctacaccaaagagataactgtcagcaattgaattatttaatagaaacaaaaaacattctcacctgtcttgcttcggccagaagtagcacagaccccattatatttcttttattagataaaacattcaagaagacactatataatctctttacaaagtctaattcagcacatatgcaatcatatggttgacttttgaatggaaaaccccacaatattaagaaaagcattcatgtgactttattagggacactaaactacatcattaacatgtcacagcttggttgacaataatcaccaagaaaatctctttggtttttaaaaataaataaacatatattcataaaactcaaaaaacagttatactgaacgttgagatggcagaaactttcagaagcaaaaattaagcatattgaaaggatcccactcatatgaaactaacaggctgttttctgtttaaactcaactgtcagtgcttctgttcagaacacgttatttcatgactaggataaagaagcaaatggtttatgacttgtctgctttctggtagttagaatacaagggtcaatctatggctagtgtttattggtaattttaaaatctttaaaaataagtagctgggcacagtggcttacgcctgtaatcccagcactttgggaggctgaggtgggtggatcattttgaggtcaggagttcaagaccagcctgggcaacatggtgaaaccctgtctctactaaaaatacaaaaatcagctggacatggtggtgggcgcctgtaatcccagctactcgggaggctgaggcaggagaatcgcttgagcccgggacggaggttgcagtgagcggagatcgtgccactgcactacagcctgggaggcagagcgagactctgtctcataaaacaaaacaaaaaaataaaaataagtaaaaaaataaataagaaatatcctcattcacatcttacctaaatgcatgaataatacagtgaaaaaaatccaaggttttataaacatattatttatttgaaattatctggctcatgttattggggagaagcaatattcattgactatatttttaaagcagatgatacttataaaaatgcttaaatatttggattaggctttgtcaaagtaaaaagctatgtcattatatgcccatcttcatcacattgtgcatattttcttctgtattcaatataaataatgttattagtgacaaacagtacctggcagttaattttttgtgaaataaatgaatgaataataagggagtgtaatagtattgcagttaagagattgatctctgaagttatacttcttgggttcaatctggctctactttttatttagctggacaatcttaggcaaattaacttatcctctgtacgtgttaatttcttcatttgtagagcagaaaatactatcttatttacagatcctattattaaatcagctgttactattatgagtagctaacgcttagtaagcacttgctgtttgccaagcattctacttatatgctttacatatattattttaatcaccacaactctaaagtatactaatttactgatgaaaatattgaagtgggctgggtgcggtggctcatgcctgtaatcccagcactctgggaggccgaggtgggcagatcacctgaggtcaggagttcgagactagcctggccaacatggcgaaacccacctctactaaaaatacaaaaattagctgggcgtggtggtgtgtgcctgtagtcccagctacttgggaggctgaggcagaagaatcacttgaactcgggaggctgaggcaggagaatcacttgaactcaggaggcggaggttgcagtgagccaagatcatgccattgcactccagcctgggcgacagagtgagactctgtctcaaaaaaaaaaaaaaaaaaaaaaaaaaaaaaaaatatatatatatatatatatatatatgtatgtatgtatgtatatgtgcatagttaagtaaatcaccccaattttttctaatatttaagtgaacatttaaagataagcatttcttaatgttaatttcttttctttcatgtaatcttgtcagtagacaaatgatggtgactatattctgtaataagtacatatattatgattaaaaaaaaaagcgtgtactatctgcccaaagagatcataagcactttggagctataaacttcttgtctatttctacttccatggtactgatattctcttctcagataaccaaacaaaaacagctgaataaaatcaaccattaatagtaacttgc

SEQ ID NO: 705 - DNA, 4378 bp, HOMO SAPIENS
gcagacccagcgccgagcccgagccatggcgtccgagcggctccctaacaggcccgcctgtctgctcgtggccagcggcgccgccgaaggtgtgtcggcccagtccttcctccactgtttcacgatggccagcaccgccttcaacctgcaggtggccacccctggggggaaagccatggaatttgtggatgtgactgagagcaatgcacgctgggtgcaagacttccgcctcaaggcttacgccagccccgccaagctcgagtccatcgatggtgcccggtaccatgccctcctgatccccagctgtcctggggccctgaccgacctggccagcagtggctccctggcccgtatcctgcagcacttccactctgagagcaaacccatctgcgccgtcggccacggtgtcgccgccctgtgctgtgccaccaacgaggacagatcctgggtgttcgacagctacagcctgacagggccctctgtgtgtgagctcgtcagggcccccggcttcgcccgcctgccgctcgtggtggaggacttcgtgaaggattcgggcgcctgcttcagtgcaagcgagcctgacgctgtccacgtcgtgctggaccgccacctggtcacaggccagaatgccagctccactgtcccggccgtgcagaacctgctcttcctctgtggcagccggaaatgaacctgctgggtagatgcaccccctgagacagcccaggtgtctccagaggcagccccgtctcaggcttcagggaccccgcctcttccctcctgacaagggccctggatggcagcctggtctggccctgatgggattgttggaggcctcctggaatcagctctgagggggtgtcggctctcctggagggtccaaacccccatcctcctgcatgttctctggtaggaggcagagaaaagaccccacgtgcctggagagctgtgctagctgctaggtggtcctcgggaattccaggctgggttttctagggaggactggttgtcacgtgtggtcactgttgactagacagagtcggctcgggggtcctctgtgtgggtttgccctgctgtggcctgtctgccacccaccacctctttcactgttggtgggggccttgaggggagggcccagccggcgggagctggctcagaactttggccaaaggtgaacggaattttttaggagcagcagcctcctgccccaaggccgaccggcactggcagcactttcctgttgaagaaatcttcctggcgtgtggtttcaaagtgtaagcacctcagtgatgcaccctgtcctaagcattgagaggcacgtttacttgtgaatatgagaccatgagattctcaatgataggaaagtgctgtcccccacggccttgcacagtggcctcgggtagagcggctatcaagagcagacagtggtccagcctgctgggcacctggcctgggctgtggccctccagcgggctgccccctggccccaggttagggcgtccaggagaggcttaggccctctacttcctcacagttccccagtttgagccatcgaaggccttcttcctgcccacctccccgtctcagccacagccgttcccaagcaccagcgtggctcctggtgccagtgacctgccaggaggccccttgtgattataaaaccgttcagttgggccgggcgcagtggctcacacctgtaaccccagcactttgggaggccgaggcgggcggatcacgaggtcaggagatcgagaccatcctggctaacatggtgaaaccccatctctactaaaaaacaaaaatacaaaaagttagcctggcatggtggtgggtgtgtgtagtcccagctacttgggaggctgaggcaggagaatggcgtgaacctgggaggcagagcttgcagtgagctgagatcgtgccactgcactccagcctgggcaatagagtgagactccatctcaaaaaaaaaacgttcagttggctgggcgcggtggctcacgcctgtaatcccagcactttgggaggccaaggtgggtggatcatctgaagtcaggagtttgggaaaagcctggccaacatggtgaaactaaaatacaaaaatgagccgggtgtggtgtcaggcgcctgtattcccagctacttgggaggctgagacgtgagaattgcttgaacctgggaggcggaagttgcagtgagccaagattgcgccattgcactccaacctgggcaatgagtgaaactccgtctcaaaaataaaaaataataaaataaagccgttcaataaggagaatttggaaaaaagtggaagaaggaagcgctgcagccacatccccgccctgaaggctgcgtccctccagtgcctcgcagattagtcaggatgcccacttagcactggccacggggccttgctctgtcccgggtccactctcatccccgtgtggtgatggacctctgtggacaaatgctttttattttatttattttttgagatggagtttgtctctcgtcacccaggctggagtgcagtggcacaatcttggctcactgcaacctctgtctcccgggttcaagcgattctcctgcctcagcctccggagtagctgggattacaggtgtgcgccaccacgcctggctaatttttgtatttttcgtagagaccgagtttcaccatgttggccaggctggtctcgaactcctgacctcaagtgatcctcccgcctcggcctcccaaagtgttaggattacaggcgtgagccactgcgcccggcgtaatttttgtttttagtagagatggggtttcatcatgttggccaggctggtcttgaactcctgacctcaggtgatccatcttcctcagcctcccaaagtgctgggattacaggcgtgagccgccacgtccggctaacaagtacttttttatttttattttattttttggatggagtctcactctgtcgcccaggctggaacacagtggcacgatctcggctcactgcagcctccgcctcccgggttcaagtgattctcctgcctcagcctcccaagtagctaggactacaggtgcacaccaccacacccagctaatttttgtatttttcctttttttttttttttgagatggagtcttgctctgttggcaggctggagtgcagtggcgcgatctcagctcactgcaacctctgcctctgcctcccagattcaagcagttctcctgcctcagcctcccgagtaactgggactacaggtgcatgccactacgcccagctagtttttgtattttcagtagagacggggtttcaccatgttggccaggatggtctcgatctcttgacctcatgatctgcccgcctcggcttcccaaagtgctgggactacaggcaagctcatgtcttaatgtcctagtccatttgggctcctataagaaaatactgtaaactggccgggcacggtggctcacgcctgtaatcccagcactttgggaggctgaggcaggtggatcacctgaggtcaggagttcgagaccagcctggccaagatggtgaaaccccgtctctactaaaaatacagaaattagccgggcgcggtggtgggcgcctgtaatcccatttacttgggaggctgaggcaggagaatcgcttgaacccaggaggcggaggttgcagtgagctgacatcgtgccactgcactctagtctgggtgacagagcaagactccatctcaaaaaaaaaaaaaaagaaaatattgtaaacctagtggcttataaacaacagaaatcagtttcagttttggaggctggaagcccaagatgaaagcaccagtagatgcaacctcttttgtgagggtgatggtcccatgatgaggctgtgcccctgccctgtgaccggatgacctcccaaatgccccacctaataccatccccttgcaggtgaggacttaagcaggtgggttttggggggacgtgctcaggccacagcagggtgcatgaagagccagtgagcctcattgagcccctctggtcagccagatctgacattgagcccagcattgaagatcaaagcaggtggggctttgggatgtgaagtgggttctgacgcggggccccacagacctgtctccgcgtgagctgcctgcaggcccctgcgtcattcctcagctgcgtgcgaggcctctggcttggagagcctccccgctgtgcacagttctctctttgccagggcagggcttggggcagcaccaggctggggcagaggaggaaagcaagaggacagacctccagaagagcagcggagggcgggtgaggatttccccatataccagtgtgtgttcatctacccatgaggaataaaaccatgcagcagcatgcaaaaaaaaaaaaaaaaaa

SEQ ID NO: 706 - DNA, 3255 bp, HOMO SAPIENS
acagtgctgaagcgggggtggggcggaggcgagtctgcgggggttttggggggtgtcgaggcctctattctgccccagagcgctggcgaaggccccttctcagcccgccttttcctttctcccgctccttctcctctactaagtgtagacgcagggccccttggcctagcttcgatcgttcgaattcagagcacgtccttccgaggtgaaggaacgcgaaactccacccatccgattgctgttcggctgcgggcgggtcctttggtcgggctgaccctgggtgagcggcccggagccaagactcgaggtagggcctggcgggcgggtgatgtcacactcctctgtgacacgcgaggctcctcagttacttagccaacggcagaggcgggaagtgagaggagtctggggctggggctgccttccaggcccacggggcggccccgctcttttcggattggttacctttgggcagagtggagactgctgcacggactctggaaccatgaacatatttgatcgaaagatcaactttgatgcgcttttaaaattttctcatataaccccgtcaacgcagcagcacctgaagaaggtctatgcaagttttgccctttgtatgtttgtggcggctgcaggggcctatgtccatatggtcactcatttcattcaggctggcctgctgtctgccttgggctccctgatattgatgatttggctgatggcaacacctcatagccatgaaactgaacagaaaagactgggacttcttgctggatttgcattccttacaggagttggcctgggccctgccctggagttttgtattgctgtcaaccccagcatccttcccactgctttcatgggcacggcaatgatctttacctgcttcaccctcagtgcactctatgccaggcgccgtagctacctctttctgggaggtatcttgatgtcagccctgagcttgttgcttttgtcttccctggggaatgttttctttggatccatttggcttttccaggcaaacctgtatgtgggactggtggtcatgtgtggcttcgtcctttttgatactcaactcattattgaaaaggccgaacatggagatcaagattatatctggcactgcattgatctcttcttagatttcattactgtcttcagaaaactcatgatgatcctggccatgaatgaaaaggataagaagaaagagaagaaatgaagtgaccatccagcctttcccaattagacttcctctccttccacccctcatttcctttttgcacacattacaggtggtgtgttctgtgataatgaaaagcatcagaaaagcttttgtactttgtggtttcctctattttgaattttttgatcaaaaaactgattagcagaatatagtttggagtttggcttcatcttcctggggttcccctcactcccttttttgtcaaccccatctgtagcctcttcctctactcaggcagtcgacccgccacgatgagaagtgggaccagcagagggcgccaacttcaggagtccgctttcccaccaggcttcattcacccagtggacctgaactgtttggtagagccacccggcccttccttcctcattgttgtttggtatgcgcacagttcctgtgggactgggccgtgagttttccattggaaagaagttcagtggtcccattgttaactcagcctcaaatctcaactgtcaggccctacaaagaaaatggagagcctcttctggtggatgctttgctccctctgagctgcccatgctggtctggcaaacacacctttctgctttgccttcacaaaagtaatgtgttccctttcccaccccttgcctgaccctcagggagtcagcctgcttccatccatgggtgggaagacttcagcacaaaggaaagactaattcttgtcaggcatttttgaaaaggctgattatgtgtatcaaggtacagcatcgtagggttcccctaaacttgccctgtttttgtttttttagtttgttatccccttactgagcggcctctactaggtggctgtgattaaatgtcccaagcaaggatagggaaggggaatggttgagcctctggagatcattgtaaccaatcctgccagacctgtttggggcagtggggagcaaacctagataaggacctgtttggggcagcagggagcaaaatctcctttaacaaccaagcagttcctcattcacatcaacagagcgaggctgtgataacttaggaggcagcaatcctaatagtccttcagtgcattttagtctgtctccaactggacaccagtaggtagtgtcaagccagagattcggggcagtagataaatgttcattttactgatgcactttagtttttggtctgttacctgttttccagaaatttgtggccttttaggcgggagttaggcgaccaaaccagtgagagccccaatccctgcagttttgtggcttcaagtgtgggtggacagtcctaatggggatctccagctccttcctgtgggctgccacagacagctacccccagaagggtcaatgttgggagtggttgtggctctgagctgctctacagagcttcagtgtgagaggatcgagccattgaaagctcattaccagtaggacataatttttggctctccctattcacaaccagtgcacagtttgacacagtggcctcaggttcacagtgcaccatgtcactgtgctatcctacgaaatcatttgtttctaagttgtgtttattcctggagtgacatgccaccccgaatggctcactttcactgaggatgctgtcctctgatttagctgctgcctccagcctctggcttgagaacttactaaaggcacttccttcctgttaaacccctgttaactctccataaatttggtgattctctgctaggcctaagattttgagttaacatctcttgaagccaaactccaccttctgtgctttttgcttgggataatggagtttttctttagaaacagtgccaagaatgacaagatattaaaaaaaaaaaagaaagaaaaaaaaaaaaacacctacttttaaagaaaatacctaacagatttttaatatagttatctctaccactttcttttctagtttcttgattttcagctcaggctgcattctaactcatactgtgaagacaaaggtgtttttgattcagaaatatatgaaatctgcatagtcttaatttgtaaaaaataaagaaaattccttaaccttta

SEQ ID NO: 707 - DNA, 2523 bp, HOMO SAPIENS
gctgagcaggagatgggaattgaaacctgcgcagaggcggctgtgcagggtgagagtggagccgaaaccacagaaagtgaagtttgcttcaacgtcttgtcccggcaggccactcagatgtgagagtgaggaagtgggatggggcctgaccggaaggaggtgcccctgagccgaggaacgcaggcggtggtcgtggggaagggaagaggagccccgggagacgacagcagcatgggtgggcggccttcgagccctctggacaagcagcagcggcagcacctaaggggtcaggtggacaccctgctgaggaacttcctgccttgctaccgtgggcagctggcagcgtctgtcctgcggcagatctctcgagagctgggccctcaggagccgaccggaagccagttgctacgcagcaaaaagctgccccgagtccgtgagcaccgaggacccctgacccagcttcggggccacccaccccggtggcagccgatcttctgtgttctgcgtggggacggccgcctagagtggttcagccacaaggaggaatatgaaaacgggggccactgccttggctcaacagccctgacaggatacacgctcctgacttcccagcgagaatatctccgccttttggatgctctctgccctgaatccttgggagaccatactcaggaagagcctgactccctcttggaagtgcctgtgagcttcccgctgttcctgcagcaccccttccgccggcacctctgcttctctgcagccaccagggaggcacagcatgcctggaggctggccctgcagggtggcatccggcttcagggcacagtcctgcagcgaagccaggcccctgctgcccgggccttcctggacgccgtccgactctaccggcagcaccaaggccactttggcgacgacgacgtgaccctaggctcagacgccgaggtgctgaccgcggtgctgatgcgggagcaacttcccgcgctgcgagcccagacccttcctggcctgcggggggcaggccgcgcccgcgcctgggcctggaccgagcttctagacgccgttcacgcagctgtcctggccggggcctccgccgggctctgcgccttccagcccgaaaaggacgagctgcttgcgtcgctggagaagacgatccgcccggacgtggaccagctgctgcggcagcgggcgcgtgtggcggggcggctgaggacggatatcaggggaccgctcgagtcgtgcctgcgccgggaggtggacccgcagctgccccgggtcgtgcagaccctgctgcgcaccgtggaagcctcgctcgaggcggtgcggaccctcctggctcaaggcatggaccgactgtcccaccgcctgcgccagagcccctcaggcacgcggctgcgcagggaggtttactcatttggggagatgccgtgggacttggcgctgatgcagacatgctaccgtgaggccgagcggagccgggggcgcttggggcagctggcagcaccgtttggctttctggggatgcagagcctcgtgtttggggcccaagatcttgcacagcagctcatggctgacgccgtggccaccttcctgcagctggctgaccagtgtctgacgacggccctcaactgtgaccaggctgcccagaggctggagagagtcagggggcgcgtgctgaagaaattcaaatcggacagcgggttggcgcagaggaggttcatccgaggctggggtctctgcatctttttaccttttgtgctgagccaactcgagccaggctgcaaaaaggagctgcctgagttcgagggggatgtccttgccgtgggcagccaggctctgaccactgagggcatctatgaggacgtcatccgggggtgcttgctgcagaggattgaccaagaattgaaaaagacccttggtgccaatgatgtatcctgcactctggacggctgcttggaggtcccatgggaacaggagggagcagctccaaatcttaacttggtgtcaagtttcctggctgggagacaagcttttaccgacttcctctgcttgccagcaaagtcatctgctaactggatattggcagcttctctgctgtcttgcagctgcttccggagtgggttccacagggattcccgtgtgttcttggttcagcttgcagagggactttcacactccctggagaccgtttcctcccattctgtctggagttttcggcctaccccaagacaatgagatattcctgacctttccacctatttccctccaaccccaccttccgaaatacatttgctcaatacatttgcacttcataggcttctttagctgtcttccttttaccccggacgggatgtagatgttaattctggaacaattgcagctacaagaatttgtcatcctgccccttttgagaaaaacattgtttgcccttgggtctaaatccttccagatgggatgggatgtatcttgtcacctcctttttcttacttaatatgaaaagacctttcctcaaaaaaaaaaaaaaaa

SEQ ID NO: 708 - DNA, 2531 bp, HOMO SAPIENS
acttgcagcctcggacgcgcggcgaggcggccgccgccggaggagcccccgcccctgcgcgcctccctcccgggagcccctgcctccctcggtgcgcgctgctgctcgcagccgccgcggccgccgaagaggagcccggggccagtctgtttccaggtctggcggggggccgggctgcggtggcggcagcggtgggagatgccggggcggccggcggaggtccatgtggcgctctaggtgggatgccagcgtcctgaaggcggaggccctggccctcctcccctgcggcctgggcatggcattctcccagtcccacgtgatggccgctcggcggcaccagcacagccggctcatcatcgaggtggacgagtacagctccaaccccacccaggccttcaccttctacaacatcaaccagggccgcttccagccaccgcatgtgcagatggtggacccggtgcctcacgatgcccccaaacctccaggctacacccgcttcgtctgcgtctctgatacccactcgaggacggaccccatccagatgccgtacggcgacgtgctgatccacgctggggacttcactgagctggggctcccgagcgaggtgaagaagttcaacgagtggctgggcagcctgccctacgagtacaagatcgtgatcgcaggcaaccacgagctgacctttgaccaggagttcatggccgacctcatcaagcaggacttttactacttcccatctgtgtcgaagctgaagccggagaactatgagaatgtgcagtcgctgctgaccaactgcatctaccttcaggactcggaggtcaccgtgcggggcttccggatctatggctccccatggcagccctggttctacggctggggcttcaacctcccgcgaggccaagccctgctggagaaatggaacctcattcccgaaggcgtagacatcctgataacccatggaccaccactgggcttcctggactgggtccccaagaagatgcagcgggtgggctgtgtggagctgctcaacacggtgcagaggcgcgtccagccgcggttacatgtctttggccacatccacgaagggtatggtgtcatggcagatgggacgaccacctatgtgaatgcgtccgtatgcactgtgaactaccagcccgtgaacccgcccatagtcatcgacctccccacaccccggaactcctgactgctccccactgcccctgccctgcccgcccgtgtcagctccacaggcctggcccggccactgttccttccatgctgagttgcctggacgacccatctggctgcggggactggcctagcaggcaggtcagggccttggaacgactctttagccttctgtcacctggagttgggaccctgcgcatccccatcaggggttctgtgctcatttactttttctgcgtgtacatcctgcgtgtacctcgttaaaggacctactaagctcatggccctgtcatgtttgggaaatgactaaatcttcattcttctcccttggacgccctcctggtttgggaagctgctgctcttgaatgggttttggaagttacacaaaatctccctctaaccacgggtctgtgtggcggcatgcccctgggttggggtgggtgggaggattcgtgagctgcacacagacagtccctttctctcctcccaagtgagggaggagacaggcccaaggcggaggccctccgagggagcatttagggacatctcaggaattcagaccgcacctggccaggcccacagctgtttgcctggcattgttcccccctttttcttcccataggcatttttgtttacttgaacaatgacctgagtgtcctaggcattcactcggagcctggatgatgggggctggttctacagaatgagccactggcattcgtgcccaggaccagtgagagcgttcccagtcatggggggatgacccttggtcccacggggaacacactgctctgtagaatgcggtagcctggatggagggtctgcaggcttaggctgcagcaggcctgccatgggtgtgaacccatgtccaggcacgcaccgacacacatgcacgcacgcacccctcttaattgaaccaagtgggtcctgtgtttctcttttctgccccgtagtgaggttctgttccttggtgcggcttcccttgcaccgttaggattctgtctggcatgcctgcagccgaggaagcccaggaccagccggccctgtgaattggagggtggcacagggaccgagcgggccccaggctccagcagccccaccttggacagcttctttttcttctttgaattaggactggagggggtggggccagggcggtggtgggaaccggtagggcctagatgaggggcaggcagtcaggcagaaatgggcaagttcagggtcagattctgtcgttatttaatattttgttcatcatggactttttctgcatttattttgatttttaacgttgcattaaagtagtattatttgtcctgaaaaaaaaaaaaaaaaaaaaaaaa

SEQ ID NO: 709 - DNA, 2221 bp, HOMO SAPIENS
tttttttttttttgccggagtcgagcgggtgctgctagcggaggcgccatattggaggggacaaaactccggcgacagcgagtgacacaaataaacccctggacccccttgttccctcagctctaagggccgcgatgttgtacctagaagactatctggaaatgattgagcagcttcctatggatctgcgggaccgcttcacggaaatgcgcgagatggacctgcaggtgcagaatgcaatggatcaactagaacaaagagtcagtgaattctttatgaatgcaaagaaaaataaacctgagtggagggaagagcaaatggcatccatcaaaaaagactactataaagctttggaagatgcagatgagaaggttcagttggcaaaccagatatatgacttggtagatcgacacttgagaaagctggatcaggaactggctaagtttaaaatggagctggaagctgataatgctggaattacagaaatattagagaggcgatctttggaattagacactccttcacagccagtgaacaatcaccatgctcattcacatactccagtggaaaaaaggaaatataatccaacttctcaccatacgacaacagatcatattcctgaaaagaaatttaaatctgaagctcttctatccacccttacgtcagatgcctctaaggaaaatacactaggttgtcgaaataataattccacagcctcttctaacaatgcctacaatgtgaattcctcccaacctctgggatcctataacattggctcgttatcttcaggaactggtgcaggggcaattaccatggcagctgctcaagcagttcaggctacagctcagatgaaggagggacgaagaacatcaagtttaaaagccagttatgaagcatttaagaataatgactttcagttgggaaaagaattttcaatggccagggaaacagttggctattcatcatcttcggcacttatgacaacattaacacagaatgccagttcatcagcagccgactcacggagtggtcgaaagagcaaaaacaacaacaagtcttcaagccagcagtcatcatcttcctcctcctcttcttccttatcatcgtgttcttcatcatcaactgttgtacaagaaatctctcaacaaacaactgtagtgccagaatctgattcaaatagtcaggttgattggacttacgacccaaatgaacctcgatactgcatttgtaatcaggtatcttatggtgagatggtgggatgtgataaccaagattgccctatagaatggttccattatggctgcgttggattgacagaggcaccaaaaggcaaatggtactgtccacagtgcactgctgcaatgaagagaagaggcagcagacacaaataaaggtggtccttttgtttgatgaagaaataaacttcagctgaagattttatataggactttaaaaagaagagaagagaaagaagaaacaatgcatttccaggcaaccacttaaaggatttacatagacaatcctataagatcttgaacttgaattttatgggttgtattttaataatgtaagtaaattatttatgcactcctggtgtgctatgaatattattccagttagccttggattatttcagtggccaacatatgcagacatttgtactcctcaaccattttctcaaagtaatgggcattctatgatttagacttcaaggaattccaatgatgaagattttaaggaaagtattttatattcaacaggtatattctgctgcatgtactgtactccagagctgttatgtaacactgtatataaatggttgcaaaaaaaaaaaaaagtcagtgcttctaaaaagaatttaagataatggtttttaaaatgcctttataataagctttgtttctttgtgaaactaattcagcaggctgaaggaaatggttcatgtgataatgtgggctggtatcctctagagtacctgggtacataaacagaaactcctgtaggtaaaaagtaatttgtgccattagtctttctatgtttctgcatccagatagagtgcagttcatgagggagggggcgggggactgaaggggaaagggcgttaaagtgatacatttttataccaaatgtgtttatttttttgtgcaagtaatccttaaaattgcaattgtattaggtgttaaaataaagtttttaaaaaattaaaaaaaaaaaaaaaaaa

SEQ ID NO: 710 - DNA, 4097 bp, HOMO SAPIENS
gctggcggcggccgcccagggccggggccgcgcgcccagcctgagcccgccccgccgccgagcgtcaccgaacctgcttgaaatgcagccgaggagccggggcgggcggcagcggcggcggcggcggcggcgggggcagcggcaaccccggcgccgcggcaaggactcggagggctgagacgcggcggcggcggcgcggggagcgcggggcgcggcggccggagccccgggcccgccatgggcctccccgagccgggccctctccggcttctggcgctgctgctgctgctgctgctgctgctgctgctgcagctccagcatcttgcggcggcagcggctgatccgctgctcggcggccaagggccggccaaggattgcgaaaaggaccaattccagtgccggaacgagcgctgcatcccctctgtgtggagatgcgacgaggacgatgactgcttagaccacagcgacgaggacgactgccccaagaagacctgtgcagacagtgacttcacctgtgacaacggccactgcatccacgaacggtggaagtgtgacggcgaggaggagtgtcctgatggctccgatgagtccgaggccacttgcaccaagcaggtgtgtcctgcagagaagctgagctgtggacccaccagccacaagtgtgtacctgcctcgtggcgctgcgacggggagaaggactgcgagggtggagcggatgaggccggctgtgctacctggctgaacgagtgtctgcacaacaatggcggctgctcacacatctgcactgacctcaagattggctttgaatgcacgtgcccagcaggcttccagctcctggaccagaagacctgtggcgacattgatgagtgcaaggacccagatgcctgcagccagatctgtgtcaattacaagggctattttaagtgtgagtgctaccctggctacgagatggacctactgaccaagaactgcaaggctgctgctggcaagagcccatccctaatcttcaccaaccggcacgaggtgcggaggatcgacctggtgaagcggaactattcacgcctcatccccatgctcaagaatgtcgtggcactagatgtggaagttgccaccaatcgcatctactggtgtgacctctcctaccgtaagatctatagcgcctacatggacaaggccagtgacccgaaagagcaggaggtcctcattgacgagcagttgcactctccagagggcctggcagtggactgggtccacaagcacatctactggactgactcgggcaataagaccatctcagtggccacagttgatggtggccgccgacgcactctcttcagccgtaacctcagtgaaccccgggccatcgctgttgaccccctgcgagggttcatgtattggtctgactggggggaccaggccaagattgagaaatctgggctcaacggtgtggaccggcaaacactggtgtcagacaatattgaatggcccaacggaatcaccctggatctgctgagccagcgcttgtactgggtagactccaagctacaccaactgtccagcattgacttcagtggaggcaacagaaagacgctgatctcctccactgacttcctgagccacccttttgggatagctgtgtttgaggacaaggtgttctggacagacctggagaacgaggccattttcagtgcaaatcggctcaatggcctggaaatctccatcctggctgagaacctcaacaacccacatgacattgtcatcttccatgagctgaagcagccaagagctccagatgcctgtgagctgagtgtccagcctaatggaggctgtgaatacctgtgccttcctgctcctcagatctccagccactctcccaagtacacatgtgcctgtcctgacacaatgtggctgggtccagacatgaagaggtgctaccgagcacctcaatctacctcaactacgacgttagcttctaccatgacgaggacagtacctgccaccacaagagcccccgggaccaccgtccacagatccacctaccagaaccacagcacagagacaccaagcctgacagctgcagtcccaagctcagttagtgtccccagggctcccagcatcagcccgtctaccctaagccctgcaaccagcaaccactcccagcactatgcaaatgaagacagtaagatgggctcaacagtcactgccgctgttatcgggatcatcgtgcccatagtggtgatagccctcctgtgcatgagtggatacctgatctggagaaactggaagcggaagaacaccaaaagcatgaattttgacaacccagtctacaggaaaacaacagaagaagaagacgaagatgagctccatatagggagaactgctcagattggccatgtctatcctgcagcaatcagcagctttgatcgcccactgtgggcagagccctgtcttggggagaccagagaaccggaagacccagcccctgccctcaaggagctttttgtcttgccgggggaaccaaggtcacagctgcaccaactcccgaagaaccctctttccgagctgcctgtcgtcaaatccaagcgagtggcattaagccttgaagatgatggactaccctgaggatgggatcacccccttcgtgcctcatggaattcagtcccatgcactacactctggatggtgtatgactggatgaatgggtttctatatatgggtctgtgtgagtgtatgtgtgtgtgtgattttttttttaaatttatgttgcggaaaggtaaccacaaagttatgatgaactgcaaacatccaaaggatgtgagagtttttctatgtataatgttttatacactttttaactggttgcactacccatgaggaattcgtggaatggctactgctgactaacatgatgcacataaccaaatgggggccaatggcacagtaccttactcatcatttaaaaactatatttacagaagatgtttggttgctgggggggcttttttaggttttggggcatttgttttttgtaaataagatgattatgctttgtggctatccatcaacataagtaaaaaaaaaaaaaaaacacttcaactccctcccccatttagattatttattaacatattttaaaaatcagatgagttctataaataatttagagaagtgagagtatttatttttggcatgtttggcccaccacacagactctgtgtgtgtatgtgtgtgtttatatgtgtatgtgtgtgacagaaaaatctgtagagaagaggcacatctatggctactgttcaaatacataaagataaatttattttcacacagtccacaaggggtatatcttgtagttttcagaaaagcctttggaaatctggatcagaaaatagataccatggtttgtgcaattatgtagtaaaaaaggcaaatcttttcacctctggctattcctgagaccccaggaagtcaggaaaagcctttcagctcacccatggctgctgtgactcctaccagggctttcttggctttggcgaaggtcagtgtacagacattccatggtaccagagtgctcagaaactcaagataggatatgcctcaccctcagctactccttgttttaaagttcagctctttgagtaacttcttcaatttctttcaggacacttgggttgaattcagtaagtttcctctgaagcaccctgaagggtgccatccttacagagctaagtggagacgtttccagatcagcccaagtttactatagagactggcccaggcactgaatgtctaggacatgctgtggatgaagataaagatggtggaataggttttatcacatctcttatttctcttttccccttactctctaccatttcctttatgtggggaaacattttaaggtaataaataggttacttaccatcatatgttcatatagatgaaactaatttttggcttaagtcagaacaactggccaaaattgaagtcatatttgaggggggaaatggcatacgcaatattatattatattggatatttatgttcacacaggaatttggtttactgctttgtaaataaaaggaaaaactccgggtatatgt

SEQ ID NO: 711 - DNA, 4738 bp, HOMO SAPIENS
tttccgtggaatcaggccggctgaatggaacaaaagtgggacttttaaaatgttgccctgtaagaagagaagaactacagtgacagagtccctacagcataaaggcaatcaagaggaaaacaacgtagacctagaatcagccgttaaaccagaatctgaccaggttaaggacttgagttcggtgtcactatcctgggatccaagtcatggcagagtagctggcttcgaagtacagtctttgcaggatgcaggaaatcagcttggtatggaggatacatctctgagctctggaatgctcacccagaacacaaatgtaccaattctagaaggtgttgatgtggccatctctcagggaatcaccctaccttccttggagtcttttcacccccttaatatacacattggtaaaggaaaactccacgctactggctcaaagagagggaaaaaaatgacactcaggcctgggccagttacccaagaagacagatgtgatcatcttaccctaaaggagcctttttcaggagagcctagtgaagaagtcaaggaagaaggagggaaacctcaaatgaattctgaaggggagataccttccctgccatcaggcagccaatctgcaaaaccagtaagccagcccaggaaatcaacccagccagatgtttgtgcctctcctcaagaaaagccactcaggactctgtttcaccaacctgaggaagagatagaagatggtggactcttcattccaatggaagaacaagacaatgaagaaagtgagaaaaggagaaaaaagaaaaagggtaccaagaggaaacgagatggaaggggtcaagaagggaccttggcatatgacctgaaactggatgacatgcttgaccgtaccttggaggatggtgccaagcagcacaatctaacagcagtcaatgtccgaaacatccttcatgaagtaatcacaaatgaacacgtggtagctatgatgaaagcagccatcagtgagacggaagatatgccaatgtttgagcctaaaatgacacgctctaaactgaaggaagtagtggaaaaaggagtggtaattccaacatggaatatttcaccaattaagaaggccaatgaaattaagcctcctcagtttgtggatatccaccttgaagaagatgattcctcagatgaagaataccagccggatgatgaagaagaagatgaaactgctgaagagagcttattggaaagtgatgttgaaagcactgcttcatctccacgtggggcaaagaaatccagattgaggcagtcttctgagatgactgaaacagatgaggagagtggcatattatcagaggctgagaaagtcaccacaccagccatcaggcacatcagtgctgaggtagtgcccatggggcccccgccccctccaaagccgaaacagaccagagatagtactttcatggagaagttacatgcggtagatgaggagctggcttccagtccagtctgcatggattctttccagcccatggatgacagtctcattgcatttcgaacgcgttctaagatgcccctgaaagatgttcccctgggccaattagaggcagagctccaagctccagacatcactccagatatgtatgaccccaatacggcagatgatgaggactggaagatgtggctggggggacttatgaatgatgatgtggggaatgaagatgaagcagatgatgatgatgatccagaatataatttcctggaagacctcgatgaaccagacacagaggatttccggactgaccgggcagtgagaatcaccaaaaaggaagtaaatgagctgatggaagagctgtttgaaactttccaagatgagatgggattctccaacatggaagatgatggcccagaagaggaggagtgtgtagctgagcctcgtcctaactttaacacccctcaagctctacggtttgaggaaccactggccaacctgttaaatgaacaacatcggacagtgaaggagctatttgaacagctgaagatgaagaaatcttcagccaaacagctgcaggaagtagagaaggttaaaccccagagtgagaaagttcatcagactctgattctggacccagcacagaggaagagactccagcagcagatgcagcagcacgttcagctcttgacccaaatccaccttcttgccacctgcaaccccaacctcaatccggaggccactaccaccaggatatttcttaaagagctgggaacctttgctcaaagctccatcgcccttcaccatcagtacaaccccaagtttcagaccctgttccaaccctgtaacttgatgggagctatgcagctgattgaagacttcagcacacatgtcagcattgactgcagccctcataaaactgtcaagaagactgcgaatgaatttccctgtttgccaaagcaagtggcttggattctggccacaagcaaggttttcatgtatccagagttacttccagtgtgttccctgaaggcaaagaatccccaggataagatcgtcttcaccaaggctgaggacaatttgttagctttaggactgaagcattttgaaggaactgagtttcctaatcctctaatcagcaagtaccttctaacctgcaaaactgcccaccaactgacagtgagaatcaagaacctcaacatgaacagagctcctgacaacatcattaaattttataagaagaccaaacagctgccagtcctaggaaaatgctgtgaagagatccagccacatcagtggaagccacctatagagagagaagaacaccggctcccattctggttaaaggccagtctgccatccatccaggaagaactgcggcacatggctgatggtgctagagaggtaggaaatatgactggaaccactgagatcaactcagatcgaagcctagaaaaagacaatttggagttggggagtgaatctcggtacccactgctattgcctaagggtgtagtcctgaaactgaagccagttgccacccgtttccccaggaaggcttggagacagaagcgttcatcagtcctgaagcccctccttatccaacccagcccctctctccagcccagcttcaaccctgggaaaacaccagcccgatcaactcattcagaagcccctccgagcaaaatggtgctccggattcctcacccaatacagccagccactgttttacagacagttccaggtgtccctccactgggggtcagtggaggtgagagttttgagtctcctgcagcactgcctgctgtgccccctgaggccaggacaagcttccctctgtctgagtcccagactttgctctcttctgcccctgtgcccaaggtaatgctgccctcccttgccccttctaagtttcgaaagccatatgtgagacggagaccctcaaagagaagaggagtcaaggcctctccctgtatgaaacctgcccctgttatccaccaccctgcatctgttatcttcactgttcctgctaccactgtgaagattgtgagccttggcggtggctgtaacatgatccagcctgtcaatgcggctgtggcccagagtccccagactattcccatcactaccctcttggttaaccctacttccttcccctgtccattgaaccagtcccttgtggcctcctctgtctcacccttaattgtttctggcaattctgtgaatcttcctataccatccacccctgaagataaggcccacgtgaatgtggacattgcttgtgctgtggctgatggggaaaatgcctttcagggcctagaacccaaattagagccccaggaactatctcctctctctgctactgttttcccgaaagtggaacatagcccagggcctccactagcagatgcagagtgccaagaaggattgtcagagaatagtgcctgtcgctggaccgttgtgaaaacagaggaggggaggcaagctctggagccgctccctcagggcatccaggagtctctaaacaaccctacccctggggatttagaggaaattgtcaagatggaacctgaagaagctagagaggaaatcagtggatcccctgagcgtgatatttgtgatgacatcaaagtggaacatgctgtggaattggacactggtgccccaagcgaggagttgagcagtgctggagaagtaacgaaacagacagtcttacagaaggaagaggagaggagtcagccaactaaaaccccttcatcttctcaagagccccctgatgaaggaacctcagggacagatgtgaacaaaggatcatcaaagaatgctttgtcctcaatggatcctgaagtgaggcttagtagccccccagggaagccagaagattcatccagtgttgatggtcagtcagtggggactccagttgggccagaaactggaggagagaagaatgggccagaagaagaggaagaagaggactttgatgacctcacccaagatgaggaagatgaaatgtcatcagcttctgaggaatctgtgctttctgtcccagaactccaggtgagagctggagaatattctcaagtatttcgtggactcagtaatatgtatcacttattgatatgccacctgcttgcttgctgcactatggatagtcctaaaatcatttgtatttgatttgtgaatgcattatgggacatgattgtggagttgaggtgaaatgagatggaaaggatgaaattttacttattatattaaactcgtttacacattaaa

SEQ ID NO: 712 - DNA, 2974 bp, HOMO SAPIENS
gcccctgcctcggccagaggtttcatttttaactgaatatttacgaaagctggaagcgtgcgaggggggtggggtggggtggaaatagcggctgcttcttttccagggatttatttaatggggatgtgttcaaggcaagagcgaattcagaaggatatcgacgtcgtgatccagaagtccagagctgagaaggactgcctgtttgcagatttcagatactctgactccacctttacttttacctacgttggcggccccagaagtgtatcctactcagtacatgtatctgaagattacccagataatacatatgtgtcaagttcagagaatgatgaagatgtgctagttactacagagccaataccagtaatttttcatagaatagcaacagaattaagaaaaacaaatgacattaactgttgcttatccataaaatccaaattacaaaaggaaaatggggaggaatcaagacagaatagtacagtggaggaagattctgaaggtgacaatgattccgaagaattttattacggaggacaggtgaactatgatggggaactgcacaagcacccacaactggaagctgatttgtcagcagttagagagatatatgggccacatgcagtttctctcagggaatatggagccattgatgatgtagatattgatctgcatatcgatgttagctttcttgatgaggagattgctgtggcttgggaagtaattcgaacagaacctataattgttcgactacactgttcacttacacagtatttaaatggcccagtgcccactgttgatgtctttcagatttccacaaaagagcgatttggattgggacatcagctgaaaaaaatcatgcagacatttgttacacagcagtggaaacagagcaaagaaaaatccaattgcctgcacaataaaaagttgtcagagaagaaagtgaagtctcccctgcatttattttctactttgcgcaggtcgccaagttatcctccccctggttgtggcaaaagcaaatccaaactgaaatctgagcaggacggaatctccaaaacgcataagctgctgcggaggacttgttccagcacagtcaagactgatgatgtgtgtgtcacaaagtcacacaggacctttggccgctccttgtccagcgatcccagggcggagcaggctatgacagcaattaaatcgcacaaacttttgaaccgtccttgccctgcagctgttaagtcagaggaatgcctaactctaaagtcgcatagactattgactcgatcttgttctggagatccacgatgtgagcacaacacaaacttgaagccccataaactgttaagcaggtcttactctagtaatctcagaatggaagaattatatggactgaaaaatcacaaattgctcagcaagtcctactccagtgcccccaagtcatccaaaactgagcttttcaaggaacctaacgcagagggcaggaggctctctcttacctcagggcttattggtatcctaacaccatcttcatcttcatcttctcagcttgctccaaatggtgcaaaatgcattccagtacgagaccgtggcttcctggtgcagacaattgagtttgctgaacagcggatccctgtattaaatgaatattgtgtggtttgtgatgagccacatgtgtttcaaaatggccctatgcttaggcctaccgtatgtgaacgggagctgtgtgtgtttgcttttcaaaccctgggagtaatgaatgaagctgctgatgaaatagcaactggagctcaggtggtagatctactagtatccatgtgtaggtctgcgttggaatctcctagaaaagttgtgattttcgagccatatccttctgtggtagatcctaatgatcctcagatgttggccttcaaccccaggaaaaagaactatgatcgagtaatgaaagcactggatagcataacttctatcagagaaatgacacaagcaccatatctggaaatcaagaagcaaatggataaacaggacccccttgctcatcccttactgcaatgggttatatcaagtaatagatcacatattgtgaaactgccagttaacaggcaattgaagtttatgcatactccacatcagttccttcttctcagcagtccaccagccaaagaatccaattttagagctgctaaaaaactctttggaagcacctttgcatttcatggctcacacattgaaaactggcactccatcctgaggaatggtctggttgttgcttctaatacacgattgcagctccatggtgcaatgtatggaagtggaatctatcttagtccaatgtcaagcatatcatttggttactcagggatgaacaagaaacagaaggtgtcagccaaggacgagccagcttcaagcagtaaaagcagcaatacatcacagtcacagaaaaaaggacagcaatcccaattcctgcaaagccgtaacttaaaatgcatagccttatgtgaagtgatcacctcatctgacctgcacaaacatggagagatatgggttgtccccaatactgaccatgtctgcacacgattctttttcgtctatgaagacggccaagtgggagatgcaaatattaatacacaagaaggaggcattcacaaagagatcctccgagtaattggtaatcaaactgctactggttaaaggaccaccatttaattaacatgattcgaaagccttcctcgggttcaaagctggattttgaactgaagaagattataaaattatttattgttattataaacaaaattaaccctttgaatactgattttttttcttagtatttctaagtatctcattaaatacctaaaatggtataagatttatcaattgtagggttatggaatctagtaataaaatttcaacagcacttaaactgaagtttgggttgctcatacaataaacagattgaaaaaacaaaaaaaaaaaaaaaaag

SEQ ID NO: 713 - DNA, 7319 bp, HOMO SAPIENS
cccgtccccggcgcggcccgcgcgctcctccgccgcctctcgcctgcgccatggccggccggtcccacccgggcccgctgcggccgctgctgccgctccttgtggtggccgcgtgcgtcctgcccggagccggcgggacatgcccggagcgcgcgctggagcggcgcgaggaggaggcgaacgtggtgctcaccgggacggtggaggagatcctcaacgtggacccggtgcagcacacgtactcctgcaaggttcgggtctggcggtacttgaagggcaaagacctggtggcccgggagagcctgctggacggcggcaacaaggtggtgatcagcggctttggagaccccctcatctgtgacaaccaggtgtccactggggacaccaggatcttctttgtgaaccctgcacccccatacctgtggccagcccacaagaacgagctgatgctcaactccagcctcatgcggatcaccctgcggaacctggaggaggtggagttctgtgtggaagataaacccgggacccacttcactccagtgcctccgacgcctcctgatgcgtgccggggaatgctgtgcggcttcggcgccgtgtgcgagcccaacgcggaggggccgggccgggcgtcctgcgtctgcaagaagagcccgtgccccagcgtggtggcgcctgtgtgtgggtcggacgcctccacctacagcaacgaatgcgagctgcagcgggcgcagtgcagccagcagcgccgcatccgcctgctcagccgcgggccgtgcggctcgcgggacccctgctccaacgtgacctgcagcttcggcagcacctgtgcgcgctcggccgacgggctgacggcctcgtgcctgtgccccgcgacctgccgtggcgcccccgaggggaccgtctgcggcagcgacggcgccgactaccccggcgagtgccagctcctgcgccgcgcctgcgcccgccaggagaatgtcttcaagaagttcgacggcccttgtgacccctgtcagggcgccctccctgacccgagccgcagctgccgtgtgaacccgcgcacgcggcgccctgagatgctcctacggcccgagagctgccctgcccggcaggcgccagtgtgtggggacgacggagtcacctacgaaaacgactgtgtcatgggccgatcgggggccgcccggggtctcctcctgcagaaagtgcgctccggccagtgccagggtcgagaccagtgcccggagccctgccggttcaatgccgtgtgcctgtcccgccgtggccgtccccgctgctcctgcgaccgcgtcacctgtgacggggcctacaggcccgtgtgtgcccaggacgggcgcacgtatgacagtgattgctggcggcagcaggctgagtgccggcagcagcgtgccatccccagcaagcaccagggcccgtgtgaccaggccccgtccccatgcctcggggtgcagtgtgcatttggggcgacgtgtgctgtgaagaacgggcaggcagcgtgtgaatgcctgcaggcgtgctcgagcctctacgatcctgtgtgcggcagcgacggcgtcacatacggcagcgcgtgcgagctggaggccacggcctgtaccctcgggcgggagatccaggtggcgcgcaaaggaccctgtgaccgctgcgggcagtgccgctttggagccctgtgcgaggccgagaccgggcgctgcgtgtgcccctctgaatgcgtggctttggcccagcccgtgtgtggctccgacgggcacacgtaccccagcgagtgcatgctgcacgtgcacgcctgcacacaccagatcagcctgcacgtggcctcagctggaccctgtgagacctgtggagatgccgtgtgtgcttttggggctgtgtgctccgcagggcagtgtgtgtgtccccggtgtgagcaccccccgcccggccccgtgtgtggcagcgacggtgtcacctacggcagtgcctgcgagctacgggaagccgcctgcctccagcagacacagatcgaggaggcccgggcagggccgtgcgagcaggccgagtgcggttccggaggctctggctctggggaggacggtgactgtgagcaggagctgtgccggcagcgcggtggcatctgggacgaggactcggaggacgggccgtgtgtctgtgacttcagctgccagagtgtcccaggcagcccggtgtgcggctcagatggggtcacctacagcaccgagtgtgagctgaagaaggccaggtgtgagtcacagcgagggctctacgtagcggcccagggagcctgccgaggccccaccttcgccccgctgccgcctgtggcccccttacactgtgcccagacgccctacggctgctgccaggacaatatcaccgcagcccggggcgtgggcctggctggctgccccagtgcctgccagtgcaacccccatggctcttacggcggcacctgtgacccagccacaggccagtgctcctgccgcccaggtgtggggggcctcaggtgtgaccgctgtgagcctggcttctggaactttcgaggcatcgtcaccgatggccggagtggctgtacaccctgcagctgtgatccccaaggcgccgtgcgggatgactgtgagcagatgacggggctgtgctcgtgtaagcccggggtggctggacccaagtgtgggcagtgtccagacggccgtgccctgggccccgcgggctgtgaagctgacgcttctgcgcctgcgacctgtgcggagatgcgctgtgagttcggtgcgcggtgcgtggaggagtctggctcagcccactgtgtctgcccgatgctcacctgtccagaggccaacgctaccaaggtctgtgggtcagatggagtcacatacggcaacgagtgtcagctgaagaccatcgcctgccgccagggcctgcaaatctctatccagagcctgggcccgtgccaggaggctgttgctcccagcactcacccgacatctgcctccgtgactgtgaccaccccagggctcctcctgagccaggcactgccggccccccccggcgccctccccctggctcccagcagtaccgcacacagccagaccacccctccgccctcatcacgacctcggaccactgccagcgtccccaggaccaccgtgtggcccgtgctgacggtgccccccacggcaccctcccctgcacccagcctggtggcgtccgcctttggtgaatctggcagcactgatggaagcagcgatgaggaactgagcggggaccaggaggccagtgggggtggctctggggggctcgagcccttggagggcagcagcgtggccacccctgggccacctgtcgagagggcttcctgctacaactccgcgttgggctgctgctctgatgggaagacgccctcgctggacgcagagggctccaactgccccgccaccaaggtgttccagggcgtcctggagctggagggcgtcgagggccaggagctgttctacacgcccgagatggctgaccccaagtcagaactgttcggggagacagccaggagcattgagagcaccctggacgacctcttccggaattcagacgtcaagaaggattttcggagtgtccgcttgcgggacctggggcccggcaaatccgtccgcgccattgtggatgtgcactttgaccccaccacagccttcagggcacccgacgtggcccgggccctgctccggcagatccaggtgtccaggcgccggtccttgggggtgaggcggccgctgcaggagcacgtgcgatttatggactttgactggtttcctgcgtttatcacgggggccacgtcaggagccattgctgcgggagccacggccagagccaccactgcatcgcgcctgccgtcctctgctgtgacccctcgggccccgcaccccagtcacacaagccagcccgttgccaagaccacggcagcccccaccacacgtcggccccccaccactgcccccagccgtgtgcccggacgtcggcccccggccccccagcagcctccaaagccctgtgactcacagccctgcttccacggggggacctgccaggactgggcattgggcgggggcttcacctgcagctgcccggcaggcaggggaggcgccgtctgtgagaaggtgcttggcgcccctgtgccggccttcgagggccgctccttcctggccttccccactctccgcgcctaccacacgctgcgcctggcactggaattccgggcgctggagcctcaggggctgctgctgtacaatggcaacgcccggggcaaggacttcctggcattggcgctgctagatggccgcgtgcagctcaggtttgacacaggttcggggccggcggtgctgaccagtgccgtgccggtagagccgggccagtggcaccgcctggagctgtcccggcactggcgccggggcaccctctcggtggatggtgagacccctgttctgggcgagagtcccagtggcaccgacggcctcaacctggacacagacctctttgtgggcggcgtacccgaggaccaggctgccgtggcgctggagcggaccttcgtgggcgccggcctgagggggtgcatccgtttgctggacgtcaacaaccagcgcctggagcttggcattgggccgggggctgccacccgaggctctggcgtgggcgagtgcggggaccacccctgcctgcccaacccctgccatggcggggccccatgccagaacctggaggctggaaggttccattgccagtgcccgcccggccgcgtcggaccaacctgtgccgatgagaagagcccctgccagcccaacccctgccatggggcggcgccctgccgtgtgctgcccgagggtggtgctcagtgcgagtgccccctggggcgtgagggcaccttctgccagacagcctcggggcaggacggctctgggcccttcctggctgacttcaacggcttctcccacctggagctgagaggcctgcacacctttgcacgggacctgggggagaagatggcgctggaggtcgtgttcctggcacgaggccccagcggcctcctgctctacaacgggcagaagacggacggcaagggggacttcgtgtcgctggcactgcgggaccgccgcctggagttccgctacgacctgggcaagggggcagcggtcatcaggagcagggagccagtcaccctgggagcctggaccagggtctcactggagcgaaacggccgcaagggtgccctgcgtgtgggcgacggcccccgtgtgttgggggagtccccggttccgcacaccgtcctcaacctgaaggagccgctctacgtagggggcgctcccgacttcagcaagctggcccgtgctgctgccgtgtcctctggcttcgacggtgccatccagctggtctccctcggaggccgccagctgctgaccccggagcacgtgctgcggcaggtggacgtcacgtcctttgcaggtcacccctgcacccgggcctcaggccacccctgcctcaatggggcctcctgcgtcccgagggaggctgcctatgtgtgcctgtgtcccgggggattctcaggaccgcactgcgagaaggggctggtggagaagtcagcgggggacgtggataccttggcctttgacgggcggacctttgtcgagtacctcaacgctgtgaccgagagcgagaaggcactgcagagcaaccactttgaactgagcctgcgcactgaggccacgcaggggctggtgctctggagtggcaaggccacggagcgggcagactatgtggcactggccattgtggacgggcacctgcaactgagctacaacctgggctcccagcccgtggtgctgcgttccaccgtgcccgtcaacaccaaccgctggttgcgggtcgtggcacatagggagcagagggaaggttccctgcaggtgggcaatgaggcccctgtgaccggctcctccccgctgggcgccacgcagctggacactgatggagccctgtggcttgggggcctgccggagctgcccgtgggcccagcactgcccaaggcctacggcacaggctttgtgggctgcttgcgggacgtggtggtgggccggcacccgctgcacctgctggaggacgccgtcaccaagccagagctgcggccctgccccaccccatgagctggcaccagagccccgcgcccgctgtaattattttctatttttgtaaacttgttgctttttgatatgattttcttgcctgagtgttggccggagggactgctggcccggcctcccttccgtccaggcagccgtgctgcagacagacctagtgccgagggatggacaggcgaggtggcagcgtggagggctcggcgtggatggcagcctcaggacacacacccctgcctcaaggtgctgagcccccgccttgcactgcgcctgccccacggtgtccccgccgggaagcagccccggctcctgaatcaccctcgctccgtcaggcgggactcgtgtcccagagaggaaggggctgctgaggtctgatggggcccttcctccgggtgaccccacagggcctttccaagcccccatttgagctgctccttcctgtgtgtgctctgggccctgcctcggcctcctgcgccaatactgtgacttccaaacaatgttactgctgggcacagctctgcgttgctcccgtgctgcctgcgccagccccaggctgctgaggagcagaggccagaccagggccgatctgggtgtcctgaccctcagctggccctgcccagccaccctggacgtgaccgtatccctctgccacaccccaggccctgcgaggggctatcgagaggagctcactgtgggatggggttgacctctgccgcctgcctgggtatctgggcctggccatggctgtgttcttcatgtgttgattttatttgacccctggagtggtgggtctcatctttcccatctcgcctgagagcggctgagggctgcctcactgcaaatcctccccacagcgtcagtgaaagtcgtccttgtctcagaatgaccaggggccagccagtgtctgaccaaggtcaaggggcaggtgcagaggtggcagggatggctccgaagccagaaatgccttaaactgcaacgtcccgtcccttccccacccccatcccatccccacccccagccccagcccagtcctcctaggagcaggacccgatgaagcgggcggcggtggggctgggtgccgtgttactaactctagtatgtttctgtgtcaatcgctgtgaaataaagtctgaaaacttt

SEQ ID NO: 714 - DNA, 2900 bp, HOMO SAPIENS
attccagcctcattgtaacacacattctacgcctagcctggctttcttgctctccctcatctcattgtttcagcggaggccaaatctgaagtcctttccagggagtggctctgttcatcttattcgccagccaaagtaggaacagcgtaagaggagagagacacattcagcagccaaaggactcggtggaaagagcagaacaccatagacaatatgtcgctcttgggacccaaggtgctgctgtttcttgctgcattcatcatcacctctgactggatacccctgggggtcaatagtcaacgaggagacgatgtgactcaagcgactccagaaacattcacagaagatcctaatctggtgaatgatcccgctacagatgaaacagttttggctgttttggctgatattgcaccttccacagatgacttggcctccctcagtgaaaaaaataccactgcagagtgctgggatgagaaatttacctgcacaaggctctactctgtgcatcggccggttaaacaatgcattcatcagttatgcttcaccagtttacgacgtatgtacatcgtcaacaaggagatctgctctcgtcttgtctgtaaggaacacgaagctatgaaagatgagctttgccgtcagatggctggtctgccccctaggagactccgtcgctccaattacttccgacttcctccctgtgaaaatgtggatttgcagagacccaatggtctgtgatcattgaaaaagaggaaagaagaaaaaatgtatgggtgagaggaaggaggatctccttcttctccaaccattgacagctaacccttagacagtatttcttaaaccaatccttttgcaatgtccagcttttacccctactctctactttttcacccaaactgataacatttatctcattttctagcacttaaaatacaaagtctatattattgcataattttgctgcttctcaatatcatagacacagtgaatagatgatgactatatggcttatatacaaacattctatgtacaatttcaagggagactaaactttaggctaataatctttactattgaatctgtctgatatagatcttagggttgaagaagctatctttgtctatttgggctaaccatagaatttcatttattttcctcacaatattttcctagaccaactccccatcattcacgtgttcctctttactcttactttaactattttgctggcttgcccgaaaatttgcctggcaagtcttccttataagacacatcatggtaagttttgtagtcctgtaagattctgcaacacagtcaagaattatacaatcctactagcaatatataaggacccaaaatgtcttctgctaagctcagaggctggggctaaagcatgaggactatgccagctatagaacttggactcataattcgctatccaatttttcatgcagttgtctagtcgggaagtaaggttggaaactaagtctcatttactgattcgtttatgggtagtaccgggatgaacccaccaccacaaagcaaattagacaacttaatgtgaaatcataccattggttgacgtttccttgagttgctacttcgttcatcttcacaacttaacaagtgcacggtcgaattattgtgcaagtggcttttggatatcctgattggggcctaagaagggcattcagacttgaattttaataggcagacagaaagtttgcctaatagttaatacgaaagagtgaaagaaacacaatattcagacaacccacattcttatcctggctctagcagtaaccacgtagccttggataagccattttccttcattaggtcctggtttaatttcctcatctttaaaatgagaaggttaaatttatcttagtactgctgggcgcagtggctcatgcctgtaatctgagcactttgggaagctgaggcgggtggatcacttgaggtcagaaatttgagacgagcctggccaacatggtgaaaccccatctctactaaaaatacaaaaattagctgggcgtggtggcacgtgcctgtaatcccagctactcgggaggctgaggcaggagaatcaattgaacctgggaggcagaggttgcagtgagccgagatggcgccattgcactccagcctgggtgacaaaagcaaaagtccatcttaagaaatatatatatatattatatatattcttagttctaagatttcctttaattctatgattctctggatttaaatgcattattcatatttcttgaagcttagatacagtctaattcatagcaaccatatctgctttatcctaggtgagggtagcagtccacaatggaatagaagaaaatcccattataacaaatgacaaattatatatcatgaatccttctgtctgactaactcaataactttctataaaagccaatggaattcaaataggagctaggagacaacaagttatatatgacagtggaggttgtattccttttatattgctgagaaaactagttaaatgatcagattcttgctgttaagaaacaatttcgtttaatgggatctgtacaactgattttaaaaaaatgctacaaaaagccccaaagcatataatctctactccttacagtctctagaattaaatgtactcatttagacaacatattaaatgcatattttagccactttagagaaacctcataggcacagagtttccaagattaattttaagaatatcttcacgaacttgaccctcctactccacattgcaacatttccatcagacagcatttcaattccagtattatgtatattgcaaattaaacattttaaaatatttttttccaatttatttctcaaaataaaatgtcttttgttctggtaaaaaaaaaaaaaaaaaa

SEQ ID NO: 715 - DNA, 2735 bp, HOMO SAPIENS
atgggcatccagggcatggagctgtgcgccatggccgtggtggtgctgctgttcatcgccgtcctcaagcagttcggcatcctggagcccatatccatggaagatagcagcgacagtgagctggagctgtccacggtgcgccaccagccagaggggctggaccagctgcaggcccagaccaagttcaccaagaaggagctgcagtctctctacaggggctttaagaatgagtgtcccacgggcctggtggacgaagacaccttcaaactcatttacgcgcagttcttccctcagggagatgccaccacctatgcacacttcctcttcaacgcctttgatgcggacgggaacggggccatccactttgaggactttgtggttggcctctccatcctgctgcggggcacagtccacgagaagctcaagtgggcctttaatctctacgacattaacaaggatggctacatcaccaaagaggagatgctggccatcatgaagtccatctatgacatgatgggccgccacacctaccccatcctgcgggaggacgcgccggcggagcacgtggagaggttcttcgagaaaatggaccggaaccaggatggggtagtgaccattgaagagttcctggaggcctgtcagaaggatgagaacatcatgagctccatgcagctgtttgagaatgtcatctaggacacgtccaaaggagtgcatggccacagccacctccacccccaagaaacctccatcctgccaggagcagcctccaagaaacttttaaaaaatagatttgcaaaaagtgaacagattgctacacacacacacacacacacacacacacacacacacagccattcatctgggctggcagaggggacagagttcagggaggggctgagtctggctaggggccgagtccaggagccccagccagcccttcccaggccagcgaggcgaggctgcctctgggtgagtggctgacagagcaggtctgcaggccaccagctgctggatgtcaccaagaaggggctcgagtgcccctgcaggggagggtccaatctccggtgtgagcccacctcgtcccgttctccattctgctttcttgccacacagtgggccggccccaggctcccctggtctcctccccgtagccactctctgcccactacctatgcttctagaaagcccctcacctcaggaccccagagggaccagctggggggcaggggggagagggggtaatggaggccaagcctgcagctttctggaaattcttccctgggggtcccaggatcccctgctactccactgacctggaagagctgggtaccaggccacccactgtggggcaagcctgagtggtgaggggccactgggccccattctccctccatggcaggaaggcgggggatttcaagtttagggattgggtcgtggtggagaatctgagggcactctctgccagctccacagggtgggatgagcctctccttgccccagtcctggttcagtgggaatgcagtgggtggggctgtacacaccctccagcacagactgttccctccaaggtcctcttaggtcccgggaggaacgtggttcagagactggcagccagggagcccggggcagagctcagaggagtctgggaaggggcgtgtccctcctcttcctgtagtgcccctcccatggcccagcagcttggctgagccccctctcctgaagcagtgtcgccgtccctctgccttgcacaaaaagcacaagcattccttagcagctcaggcgcagccctagtgggagcccagcacactgcttctcggaggccaggccctcctgctggctgaggcttgggcccagtagccccaatatggtggccctggggaagaggccttgggggtctgctctgtgcctgggatcagtggggccccaaagcccagcccggctgaccaacattcaaaagcacaaaccctggggactctgcttggctgtcccctccatctggggatggagaatgccagcccaaagctggagccaatggtgagggctgagagggctgtggctgggtggtcagcagaaacccccaggaggagagagatgctgctcccgcctgattggggcctcacccagaaggaacccggtcccaggccgcatggcccctccaggaacattcccacataatacattccatcacagccagcccagctccactcagggctggcccggggagtccccgtgtgccccaagaggctagccccagggtgagcagggccctcagaggaaaggcagtatggcggaggccatgggggcccctcggcattcacacacagcctggcctcccctgcggagctgcatggacgcctggctccaggctccaggctgactgggggcctctgcctccaggagggcatcagctttccctggctcagggatcttctccctcccctcacccgctgcccagccctcccagctggtgtcactctgcctctaaggccaaggcctcaggagagcatcaccaccacacccctgccggccttggccttggggccagactggctgcacagcccaaccaggaggggtctgcctcccacgctgggacacagaccggccgcatgtctgcatggcagaagcgtctcccttggccacggcctgggagggtggttcctgttctcagcatccactaatattcagtcctgtatattttaataaaataaacttgacaaaggaaaaaaaaaaaaaaa

SEQ ID NO: 716 - DNA, 1126 bp, HOMO SAPIENS
gtggcgagggcggtgcctgggggcaggggcctcctcggagggcggcggggacagacccgtcgccccggctccgcagccccgccccggccccgcctccgctccggccgccgaaggctataagatctaggaacccgagccggtggtagggcgggcgcggaccgtgctgggagcggcgcggctggagcgcagcgccgaagggactggcagggctgaagtgtgcgggacagcaagcccccgaatagccccggctgccacctcgcaggacccaaggccacgcgcgccgggcccagctgagccgcctcatgaagccgcccgcggcgcagggcagccccgcggccgccgcggccgcagccccggccctggactcggcggccgcggaggacctgtcggacgcgctgtgcgagtttgacgcggtgctggccgacttcgcgtcgcccttccacgagcgccacttccactacgaggagcacctggagcgcatgaagcggcgcagcagcgccagtgtcagcgacagcagcggcttcagcgactcggagagtgcagattcactttataggaacagcttcagcttcagtgatgaaaaactgaattctccaacagactctaccccagctcttctctctgccactgtcactcctcagaaagctaaattaggagacacaaaagagctagaagccttcattgctgatcttgacaaaactttagcaagtatgtgaaacaagaagttctgggtcctttcatcataagggagaagcttcagaaagttccgaggacctgctaaaatcagctactagaatctgctgccagaggggacaaagacgtgcactcaaccttctaccaggccactctcaggctcaccttaaaatcagcccttgatcccatttctgggcaatttagacagtgaaactgactttgtttacctgcttgcagcatattagaacagacgatccatgctaatattgtattttctcttaaaacatagctttcctgtaatttaaagtgcttttatgaaaatatttgtaattaattatatatagttggaaatagcagtaagctttcccattataatatatttttgtatacaaataaaatttgaactgaagtctgcaaaaaaaaaaaaaaaaaa

SEQ ID NO: 717 - DNA, 5330 bp, HOMO SAPIENS
agtatttttggagaagttagtaaaaccgaatctgacatcatcacctagcagttcatgcagctagcaagtggtttgttcttagggtaacagaggaggaaattgttcctcgtctgataagacaacagtggagaaaggacgcatgctgtttcttagggacacggctgacttccagatatgaccatgtatttgtggcttaaactcttggcatttggctttgcctttctggacacagaagtatttgtgacagggcaaagcccaacaccttcccccactggattgactacagcaaagatgcccagtgttccactttcaagtgaccccttacctactcacaccactgcattctcacccgcaagcacctttgaaagagaaaatgacttctcagagaccacaacttctcttagtccagacaatacttccacccaagtatccccggactctttggataatgctagtgcttttaataccacaggtgtttcatcagtacagacgcctcaccttcccacgcacgcagactcgcagacgccctctgctggaactgacacgcagacattcagcggctccgccgccaatgcaaaactcaaccctaccccaggcagcaatgctatctcagatgtcccaggagagaggagtacagccagcacctttcctacagacccagtttccccattgacaaccaccctcagccttgcacaccacagctctgctgccttacctgcacgcacctccaacaccaccatcacagcgaacacctcagatgcctaccttaatgcctctgaaacaaccactctgagcccttctggaagcgctgtcatttcaaccacaacaatagctactactccatctaagccaacatgtgatgaaaaatatgcaaacatcactgtggattacttatataacaaggaaactaaattatttacagcaaagctaaatgttaatgagaatgtggaatgtggaaacaatacttgcacaaacaatgaggtgcataaccttacagaatgtaaaaatgcgtctgtttccatatctcataattcatgtactgctcctgataagacattaatattagatgtgccaccaggggttgaaaagtttcagttacatgattgtacacaagttgaaaaagcagatactactatttgtttaaaatggaaaaatattgaaacctttacttgtgatacacagaatattacctacagatttcagtgtggtaatatgatatttgataataaagaaattaaattagaaaaccttgaacccgaacatgagtataagtgtgactcagaaatactctataataaccacaagtttactaacgcaagtaaaattattaaaacagattttgggagtccaggagagcctcagattattttttgtagaagtgaagctgcacatcaaggagtaattacctggaatccccctcaaagatcatttcataattttaccctctgttatataaaagagacagaaaaagattgcctcaatctggataaaaacctgatcaaatatgatttgcaaaatttaaaaccttatacgaaatatgttttatcattacatgcctacatcattgcaaaagtgcaacgtaatggaagtgctgcaatgtgtcatttcacaactaaaagtgctcctccaagccaggtctggaacatgactgtctccatgacatcagataatagtatgcatgtcaagtgtaggcctcccagggaccgtaatggcccccatgaacgttaccatttggaagttgaagctggaaatactctggttagaaatgagtcgcataagaattgcgatttccgtgtaaaagatcttcaatattcaacagactacacttttaaggcctattttcacaatggagactatcctggagaaccctttattttacatcattcaacatcttataattctaaggcactgatagcatttctggcatttctgattattgtgacatcaatagccctgcttgttgttctctacaaaatctatgatctacataagaaaagatcctgcaatttagatgaacagcaggagcttgttgaaagggatgatgaaaaacaactgatgaatgtggagccaatccatgcagatattttgttggaaacttataagaggaagattgctgatgaaggaagactttttctggctgaatttcagagcatcccgcgggtgttcagcaagtttcctataaaggaagctcgaaagccctttaaccagaataaaaaccgttatgttgacattcttccttatgattataaccgtgttgaactctctgagataaacggagatgcagggtcaaactacataaatgccagctatattgatggtttcaaagaacccaggaaatacattgctgcacaaggtcccagggatgaaactgttgatgatttctggaggatgatttgggaacagaaagccacagttattgtcatggtcactcgatgtgaagaaggaaacaggaacaagtgtgcagaatactggccgtcaatggaagagggcactcgggcttttggagatgttgttgtaaagatcaaccagcacaaaagatgtccagattacatcattcagaaattgaacattgtaaataaaaaagaaaaagcaactggaagagaggtgactcacattcagttcaccagctggccagaccacggggtgcctgaggatcctcacttgctcctcaaactgagaaggagagtgaatgccttcagcaatttcttcagtggtcccattgtggtgcactgcagtgctggtgttgggcgcacaggaacctatatcggaattgatgccatgctagaaggcctggaagccgagaacaaagtggatgtttatggttatgttgtcaagctaaggcgacagagatgcctgatggttcaagtagaggcccagtacatcttgatccatcaggctttggtggaatacaatcagtttggagaaacagaagtgaatttgtctgaattacatccatatctacataacatgaagaaaagggatccacccagtgagccgtctccactagaggctgaattccagagacttccttcatataggagctggaggacacagcacattggaaatcaagaagaaaataaaagtaaaaacaggaattctaatgtcatcccatatgactataacagagtgccacttaaacatgagctggaaatgagtaaagagagtgagcatgattcagatgaatcctctgatgatgacagtgattcagaggaaccaagcaaatacatcaatgcatcttttataatgagctactggaaacctgaagtgatgattgctgctcagggaccactgaaggagaccattggtgacttttggcagatgatcttccaaagaaaagtcaaagttattgttatgctgacagaactgaaacatggagaccaggaaatctgtgctcagtactggggagaaggaaagcaaacatatggagatattgaagttgacctgaaagacacagacaaatcttcaacttatacccttcgtgtctttgaactgagacattccaagaggaaagactctcgaactgtgtaccagtaccaatatacaaactggagtgtggagcagcttcctgcagaacccaaggaattaatctctatgattcaggtcgtcaaacaaaaacttccccagaagaattcctctgaagggaacaagcatcacaagagtacacctctactcattcactgcagggatggatctcagcaaacgggaatattttgtgctttgttaaatctcttagaaagtgcggaaacagaagaggtagtggatatttttcaagtggtaaaagctctacgcaaagctaggccaggcatggtttccacattcgagcaatatcaattcctatatgacgtcattgccagcacctaccctgctcagaatggacaagtaaagaaaaacaaccatcaagaagataaaattgaatttgataatgaagtggacaaagtaaagcaggatgctaattgtgttaatccacttggtgccccagaaaagctccctgaagcaaaggaacaggctgaaggttctgaacccacgagtggcactgaggggccagaacattctgtcaatggtcctgcaagtccagctttaaatcaaggttcataggaaaagacataaatgaggaaactccaaacctcctgttagctgttatttctatttttgtagaagtaggaagtgaaaataggtatacagtggattaattaaatgcagcgaaccaatatttgtagaagggttatattttactactgtggaaaaatatttaagatagttttgccagaacagtttgtacagacgtatgcttattttaaaattttatctcttattcagtaaaaaacaacttctttgtaatcgttatgtgtgtatatgtatgtgtgtatgggtgtgtgtttgtgtgagagacagagaaagagagagaattctttcaagtgaatctaaaagcttttgcttttcctttgtttttatgaagaaaaaatacattttatattagaagtgttaacttagcttgaaggatctgtttttaaaaatcataaactgtgtgcagactcaataaaatcatgtacatttctgaaatgacctcaagatgtcctccttgttctactcatatatatctatcttatatagtttactattttacttctagagatagtacataaaggtggtatgtgtgtgtatgctactacaaaaaagttgttaactaaattaacattgggaaatcttatattccatatattagcatttagtccaatgtctttttaagcttatttaattaaaaaatttccagtgagcttatcatgctgtctttacatggggttttcaattttgcatgctcgattattccctgtacaatatttaaaatttattgcttgatacttttgacaacaaattaggttttgtacaattgaacttaaataaatgtcattaaaataaataaatgcaatatgtattaatattcattgtataaaaatagaagaatacaaacatatttgttaaatatttacatatgaaatttaatatagctatttttatggaatttttcattgatatgaaaaatatgatattgcatatgcatagttcccatgttaaatcccattcataactttcattaaagcatttactttgaatttctccaatgcttagaatgtttttaccaggaatggatgtcgctaatcataataaaattcaaccattatttttttcttgtttataatacattgtgttatatgttcaaatatgaaatgtgtatgcacctattgaaatatgtttaatgcatttattaacatttgcaggacacttttacaggccccaattatccaatagtctaataattgtttaagatctag

SEQ ID NO: 718 - DNA, 2312 bp, HOMO SAPIENS
ctccacaggtccgccccaatccccgctcacacttgggaaacttgggactgcgctggggccgcgtgtggcacctcaggggggcggcccccggcctcaagaggagggggaggagaaggaggaagaggaggaagtgagcccgaaggatccgctcggagctgtttgtccagctgtttctattcgcacccggagcagtacagccagaagggggccgagccgaaggtggctggctttaggcgctaatttccaactcttttcctcacagcttgtcttttccaggcaccctggagtcccctcaggccagctcggtgggcgcgcacctgccagccgcccctgacctcgcaggccaggcgacctccgagcctgagaagatggcccagtccaagctcgattgccgctcacctgtcggcctcgactgctgcaactgctgcctggacctggcccatcggagtgggctccagcgaggcagcagcggggagaacaacaacccgggcagccctacagtgagcaactttcggcagctgcaggaaaagctggtctttgagaacctcaataccgacaagctcaacagcataatgcggcaggattcgctagagccggtgctgcgggacccctgctacctgatcaacgagggcatctgcaaccgcaacatcgaccagaccatgctctccatcctgctcttcttccacagtgcctccggagccagcgtggtggccatagacaacaagatcgaacaggccatggatctggtgaagaatcatctgatgtatgctgtgagagaggaggtggagatcctgaaggagcagatccgagagctggtggagaagaactcccagctagagcgtgagaacaccctgttgaagaccctggcaagcccagagcagctggagaagttccagtcctgtctgagccctgaagagccagctcccgaatccccacaagtgcccgaggcccctggtggttctgcggtgtaagtggctctgtcctcagggtgggcagagccactaaacttgttttacctagttctttccagtttgtttttggctccccaagcatcatctcacgaggagaactttacacctagcacagctggtgccaagagatgtcctaaggacatggccacctgggtccactccagcgacagacccctgacaagagcaggtctctggaggctgagttgcatggggcctagtaacaccaagccagtgagcctctaatgctactgcgccctgggggctcccagggcctgggcaacttagctgcaactggcaaaggagaagggtagtttgaggtgtgacaccagtttgctccagaaagtttaaggggtctgtttctcatctccatggacatcttcaacagcttcacctgacaacgactgttcctatgaagaagccacttgtgttttaagcagaggcaacctctctcttctcctctgtttcgtgaaggcaggggacacagatgggagagattgagccaagtcagccttctgttggttaatatggtataatgcatggctttgtgcacagcccagtgtgggattacagctttgggatgaccgcttacaaagttctgtttggttagtattggcatagtttttctatatagccataaatgcgtatatatacccatagggctagatctgtatcttagtgtagcgatgtatacatatacacatccacctacatgttgaagggcctaaccagccttgggagtattgactggtcccttacctcttatggctaagtctttgactgtgttcatttaccaagttgacccagtttgtcttttaggttaagtaagactcgagagtaaaggcaaggaggggggccagcctctgaatgcggccacggatgccttgctgctgcaaccctttccccagctgtccactgaaacgtgaagtcctgttttgaatgccaaacccaccattcactggtgctgactacatagaatggggttgagagaagatcagtttgggcttcacagtgtcatttgaaaacgttttttgttttgttttgtaattattgtggaaaactttcaagtgaacagaaggatggtgtcctactgtggatgagggatgaacaaggggatggctttgatccaatggagcctgggaggtgtgcccagaaagcttgtctgtagcgggttttgtgagagtgaacactttccactttttgacaccttatcctgatgtatggttccaggatttggattttgattttccaaatgtagcttgaaatttcaataaactttgctctgtttttctaaaaataaaaaaaaaaaaaaaaaaaaaaaaaaaaaaaaaaaaaaaaaaaaaa

SEQ ID NO: 719 - DNA, 2000 bp, HOMO SAPIENS
gggagcgcgaacctgaggaggaagaaacggggctagcgcgcaggcccagaacggtccgagccgcggcagtcggcgacgcctcagagcggaagagggaagtgaatcaggcgccgggtagtgggttgctgggctgggcttgctgaggtagaggcagcgccaagaagaggcctttgccgctggtcgggattgggatgtcgaagaacacagtgtcgtcggcccgcttccggaaggtggacgtggatgaatatgacgagaacaagttcgtggacgaagaagatgggggcgacggccaggccgggcccgacgagggcgaggtggactcctgcctgcggcaaggaaacatgacagctgccctacaggcagctctgaagaacccccctatcaacaccaagagtcaggcagtgaaggaccgggcaggcagcattgtcttgaaggtgctcatctcttttaaagctaatgatatagaaaaggcagttcaatctctggacaagaatggtgtggatctcctaatgaagtatatttataaaggatttgagagcccgtctgacaatagcagtgctatgttactgcaatggcatgaaaaggcacttgctgctggaggagtagggtccattgttcgtgtcttgactgcaagaaaaactgtgtagtctggcaggaagtggattatctgcctcgggagtgggaattgctggtacaaagaccaaaacaaccaaatgccaccgctgccctgtgggtagcatctgtttctctcagctttgccttcttgctttttcatatctgtaaagaaaaaaattacatatcagttgtcctttaatgaaaattgggataatatagaagaaattgtgttaaaatagaagtgtttcatcctttcaaaaccatttcagtgatgtttataccaatctgtatatagtataatttacattcaagtttaattgtgcaacttttaacccctgttggctggttttttgttctgttttgttttgtattatttttaactaatactgagagatttggtcagaatttgaggccagtttcctagctcattgctagtcaggaaatgatatttataaaaaatatgagagactggcagctattaacattgcaaaactggaccatatttcccttatttaataagcaaaatatgtttttggaataagtggtgggtgaataccactgctaagttatagctttgtttttgcttgcctcctgattatctgtactgtgggtttaagtatgctactttctctcagcatccaataatcatggcccctcaatttatttgtggtcacccagggttcagagcaagaagtcttgctttatacaaatgtatccataaaatatcagagcttgttgggcatgaacatcaaacttttgttccactaatatggctctgtttggaaaaaactgcaaatcagaaagaatgatttgcagaaagaaagaaaaactatggtgtaatttaaactctgggcagcctctgaatgaaatgctactttctttagaaatataatagctgccttagacattatgaggtatacaactagtatttaagataccatttaatatgccccgtaaatgtcttcagtgttcttcagggtagttgggatctcaaaagatttggttcagatccaaacaaatacacattctgtgttttagctcagtgttttctaaaaaaagaaactgccacacagcaaaaaattgtttactttgttggacaaaccaaatcagttctcaaaaaatgaccggtgcttataaaaagttataaatatcgagtagctctaaaacaaaccacctgaccaagagggaagtgagcttgtgcttagtatttacattggatgccagttttgtaatcactgacttatgtgcaaactggtgcagaaattctataaactctttgctgtttttgatacctgctttttgtttcattttgttttgttttgtaaaaatgataaaacttcagaaaataaaatgtcagtgttgaataaaaaaaaaaaaaaaaaaaa

SEQ ID NO: 720 - DNA, 4225 bp, HOMO SAPIENS
gcagagggtgcggcccagaggaggccgcgggccgggaagggccgggcgggacgggaaacgttagggcagcggcccccggggtgagggggccgagcggacgggcagggccccgaggcgaactctgcccggatgaggaacaaagcagtggggcaggcgcgtgcgcccccagcgcagctggcaggttgggcagcccccttcccgaagcttctggacggaaggccccaggtgttccccgagatgccccaacccgtggcggggtgcacggccaccggccctcgggagaagttgggcggccccgggcgaccccggggacgagtggccgcgtcggtgcagcggttgtgagcaagatgtggtagcacgtgaccctggaacgcaaaccctgatgcctgttccccaccacccgagcgctcctttctctgatatttggccccaagccgatgcatcacaggatgaatgaaatgaacctgagtccagtggggatggagcagctgacttcatcctctgtgagcaatgccttgccagtctcaggaagtcacctgggattggctgcctcacccactcacagtgccatccctgccccaggcctcccagtggcaattccaaacctgggtccctccctgagctctctgccttctgctctgtctttaatgctaccaatgggtattggggatcgaggggtgatgtgtgggttacctgaaagaaactacaccctacctccaccaccttaccctcacctggagagcagttatttcagaaccattctacctggcattttatcttatttagctgacagaccacctccacagtacatccaccctaactctataaatgttgatggtaatacagcattatctatcaccaataacccttcagcactagatccctatcagtccaatggaaatgttggattagaaccaggcattgtttcaatagactctcgctctgtgaacacacatggtgcccaaagtcttcatcccagtgatggccatgaggtggccttggacacagcaatcactatggagaacgtttctagggttaccagcccaatttcgacagatggaatggcagaggagcttacgatggacggtgttgcaggcgagcattcccaaatcccaaatggctccagaagtcatgaacctctgtctgtggattctgtgagcaacaaccttgcagcagacgctgtaggacatggtggtgtgatacccatgcatgggaatggcctggagctccctgtggtcatggagacagaccacattgcaagtcgggtcaatggcatgtctgacagtgccctcagtgactccattcacactgtggccatgagcaccaactctgtaagcgtggcactctctacctcacacaaccttgcctccctagaatctgtttccctccatgaagttggcctcagcctagaacctgtggctgtctcctccatcacccaggaggttgctatggggacaggtcatgtagatgtatcttcagacagtctttcttttgtatcaccttcactgcaaatggaagactccaattcaaacaaggagaacatggcaaccttgtttacaatttggtgtactctgtgtgaccgcgcctatccctcggactgtcccgaacatggaccagtgacttttgttcctgacactccaatagagagcagagcaaggctttctctcccaaagcagcttgttctccgtcagtcaattgtgggagcagaagttggtgtatggactggagaaaccattcctgtgcggacttgctttggacctctaattggccagcagagtcactccatggaagtagcagaatggacagacaaggcagttaaccatatctggaagatataccacaatggtgtcctagaattctgcatcattacaactgatgaaaatgaatgtaattggatgatgtttgtgcgcaaagccaggaaccgggaagagcagaatttggtggcttatcctcatgatggaaaaatctttttctgcacctcacaagatatccctcctgaaaatgaactgcttttttattatagccgagattatgctcaacagattggtgttcctgaacacccagatgtgcatctctgtaactgtggcaaggagtgcaattcttacacagagttcaaagcccatctgaccagccacatccataaccatcttcctacccagggacatagcggcagccatgggccaagtcacagcaaagaaaggaagtggaagtgctcaatgtgcccccaagcttttatctctccttccaaacttcatgtccactttatgggtcacatgggtatgaagccccacaagtgtgatttctgtagcaaggcttttagtgatcccagcaacctgcggacccacctcaagatacatacaggtcagaagaactacaggtgtaccttgtgtgacaagtctttcacccagaaggctcacctggagtcccacatggttatccacactggggagaagaatcttaagtgtgattactgtgacaagttgtttatgcggaggcaggacctcaagcagcacgtgctcatccacactcaagaacgccagatcaagtgtcccaagtgtgataagctgttcttgagaacaaatcacttaaagaagcatctcaattctcatgaaggaaaacgggattatgtctgtgaaaaatgtacaaaggcttatctaaccaaataccatctcacccgccacctgaaaacctgcaaagggcccacctccagttcgtcagcaccagaggaggaagaagaggatgactcagaagaggaagatctagcagactctgtggggacagaagactgtaggattaacagtgctgtgtattcagcggatgagtctctttctgcacataaataaaaggaaaagaaacaagcaattttggatgaaaatgcaaatggaaaaatacacataaccagttatctactataatggtttttatataaaatggttcctgatttattttcagccagtaatcaaaacagactgggaatgaataaagcacttacagaagagtatcctaatgaaaacactttaaaacagattgggaaaactgagcatgtgtcctgttttaagtggtggactgggagggaagtgtcaacttctgaggtctttatttacatgataatctgggagatgcatttatgcctgaatcaaagctgccttctgctcaaacaaatcagatttatttcacattcttccattattccattttcctgctggtcctgtgacttggtaacattctaaacggtccttgccccatagccatcctgattgctgatagtgttttatgcagactcttgtgacttatactcaccacagaatggattgggacacagcagcataagtgtgctacttggcagctagtaagtttaaagcaggacctgccttaactgctcctggccacttggaagtttagggtagatcttgttttccaaagtttcggcaggtgcctggagggcaaataaaaaagcagcagtcagtcagtagtcagtgatggagagaacaagaggagagatgcctggcctctgcccaagaaattagctttgatggaagcctgagcaagtcacctggttattgtaacgtggagatctttgtaggtttagacatggctccctgtctccagtaaacatccagccattcagacaaagggggcctggagatacagagagcccaaataatgcctgctggattgtctcctgatgagtacatgtggactcacctgaggaagggaaggaagggaataatcttttatgtttcatttaccttatgaaaagtgttaaaacattgccaactcaaaataacattatttaatgcatgtgcaaagttaggtcttcccagttgtctcagtgctgaggaacctcatcagagaagcatggaagatgccaaaggatttttggaaggtaaagaaggctgaatagtgaccacatgggcctgttttcagggtcccagcttagttaagtcacccatgcacctggtcattgtgtctcccatgcacatccagcgtttctcagaagcagacccacccttaagttgacaggattgatggaacatgctctcctgctcaaggcacaacctctgggctggagtagaggactctggtgggaaggttttgctgctaatgtatttatggaatgaatgtatttcattcaaatctgtattcctctaggaaggattaaaattaaacttttttaaaatacaggaaaaaaaaaaaaaaaaaaaaaaaaaaaaaaaaaaaaaaa

SEQ ID NO: 721 - DNA, 9042 bp, HOMO SAPIENS
gcgcgccaagacgtgggcacctcctcacccggaccccgggccccgccgagccgcctcctggctcccgtggccgccagcccgccccggccgcaccgagcgtcgggatccgaggtgggagcgtacccctccccgctccccggacgcctcagtcctccgcactgagcttggccacgcgcccctaggcgccccccacgccctgggccccggagggccgcagccatgagtgaaatgtccagctttcttcacatcggggacatcgtctccctgtacgccgagggctccgtcaatggcttcatcagcactttggggctggtggatgaccgctgtgtggtggagcccgcggccggggacctggacaacccccctaagaagttccgtgactgcctcttcaaggtgtgccccatgaaccgctactcggcccagaagcagtactggaaggccaagcagactaagcaggacaaggagaagatcgctgatgtggtgttgctgcagaagctgcagcatgcggcgcagatggagcagaagcaaaatgacacggagaacaagaaggtgcatggggatgtcgtgaagtatggcagtgtgatccagctcctgcacatgaagagcaacaagtacctgacagtgaacaagcggcttccggccttgctggagaagaacgccatgcgggtgactctggatgccacaggcaacgagggttcctggctcttcatccagcccttctggaagctgcggagcaacggggacaacgtggtcgtgggggacaaggtgatcctgaatcctgtcaatgccgggcagcctctgcatgccagcaattacgagctcagcgacaacgccggctgcaaggaggtcaattctgtgaactgcaacaccagctggaagatcaacctgtttatgcagtttcgggaccacctggaggaggtgttgaaagggggagacgtggtgcggctgttccatgcggagcaggagaagttcctgacgtgtgacgagtacaagggcaagctgcaggtgttcctgcgaactacactgcgccagtctgccacctcggccaccagctccaatgctctctgggaggtggaggtggtccaccacgacccctgccgtggaggagctgggcactggaatggcttgtaccgcttcaagcacctggctacaggcaactacctggctgctgaggagaaccccagttacaaaggtgatgcctcagatcccaaggcagcaggaatgggggcacagggccgcacaggccgcaggaatgctggggagaagatcaagtactgcctggtggctgtgcctcatggcaatgacatcgcctctctctttgagctggaccccaccaccttgcagaaaaccgactctttcgtgccccggaactcgtacgtccggctgcggcacctctgcaccaacacgtggattcagagcaccaatgtgcccattgacatcgaggaggagcggcccatccggctcatgctgggcacctgccccaccaaggaggacaaggaggcctttgccatcgtgtcagtgcccgtgtctgagatccgagacctggactttgccaatgacgccagctccatgctggccagtgccgtggagaaactcaacgagggcttcatcagccagaatgaccgcaggtttgtcatccagctgctggaagacctggtgttctttgtcagcgatgtccccaacaatgggcagaatgtcctggacatcatggtcactaagcccaaccgggaacggcagaagctgatgagggagcagaacatcctcaaacaggtctttggcattctgaaggccccgttccgtgagaaggggggtgaaggtcccctggtgcggctggaggagctgtcagaccagaagaacgccccctaccagcacatgttccgcctgtgctaccgcgtgttgcggcattcccaggaggactaccgcaagaaccaggagcacattgccaagcagtttgggatgatgcagtcccagattggctacgacatcctggccgaggacaccatcactgccctgctgcacaacaaccgcaagctcctggaaaagcacatcaccaagaccgaggtggagaccttcgtcagccttgtgcgcaagaaccgggagcccaggttcctggactacctctctgacctgtgtgtgtccaaccacatcgccatccccgtcacccaagagctcatctgcaagtgtgtgctggaccccaagaacagtgacattctcatccggaccgagcttcggcccgtgaaggagatggcccaatcccacgagtacctgagcatcgagtactcagaagaggaagtgtggctcacgtggactgacaagaataacgagcatcatgagaagagtgtgaggcagctggcccaggaggcgcgggccggcaacgcccacgacgagaatgtgctcagctactacaggtaccagctgaagctctttgcccgcatgtgcttggaccgccagtacttggccatcgacgagatctcccagcagctgggcgtggacctgattttcctgtgcatggcagacgagatgctgccctttgacctgcgcgcctccttctgccacctgatgctgcacgtgcacgtggaccgtgacccccaggagctggtcacgccggtcaagtttgcccgtctctggactgagatccccacagccatcaccatcaaggactatgattccaacctcaacgcgtcccgagatgacaagaagaacaagtttgccaacaccatggagttcgtggaggactacctcaacaatgtagtcagcgaggccgtgccctttgccaacgaggagaagaacaagctcacttttgaggtggtcagcctggcgcacaatctcatctacttcggcttctacagcttcagcgagctgctgcggctcactcgcacactgctgggcatcatcgactgtgtgcaggggcccccggccatgctgcaggcctatgaggaccccggtggcaagaatgtgcggcggtccatccagggcgtggggcacatgatgtccaccatggtgctgagccgcaagcagtccgtcttcagtgcccccagcctgtctgctggggccagtgctgctgagccgctggacagaagcaagtttgaggagaatgaggacattgtggtgatggagaccaagctgaagatcctggaaatccttcagttcatcctcaatgtccgcctggattaccgcatatcctacctgctgtctgtcttcaagaaggagtttgtggaggtgtttcccatgcaggacagtggggctgatggcacagcccctgccttcgactctaccactgccaacatgaacctggatcgcatcggggagcaggcggaggccatgtttggagtggggaagacaagcagcatgctggaggtggatgacgagggcggccgcatgttcctgcgcgtgctcatccacctcaccatgcacgactatgcgccgctggtctcgggtgccctgcagctgctcttcaagcacttcagccagcgccaggaggccatgcacaccttcaagcaggttcagctgctgatctcagcgcaggacgtggagaactacaaggtgatcaagtcggagctggaccggctgcggaccatggtggagaagtcagagctgtgggtggacaagaagggcagtggcaagggtgaggaggtggaggcaggcgccgccaaggacaagaaagagcgtcccacggacgaggagggctttctgcacccaccaggggagaaaagcagtgagaactaccagatcgtcaagggcatcctggaaaggctgaacaagatgtgcggggttggggagcaaatgaggaagaagcagcaacggctgctgaagaacatggatgcccacaaggtcatgctggacctgctgcagatcccctatgacaagggtgatgccaagatgatggagatcctgcgctacacgcaccagttcctgcagaagttctgtgcagggaaccccggcaaccaggccctgctgcacaaacacctgcacctcttcctcacgccagggctcctggaggcagagaccatgcagcacatcttcctgaacaactatcagctctgctccgagatcagcgagcctgtgttgcagcacttcgtgcacctgctggccacgcacgggcgccatgtgcagtacctggacttcctgcacaccgtcattaaggccgagggcaagtacgtcaagaagtgccaggacatgatcatgactgagctgaccaatgcaggtgacgatgtggtcgtgttctacaatgataaggcatcgctggcccacctgctggacatgatgaaggccgcccgcgacggcgtggaggaccacagccccctcatgtaccacatttccctggtggacctgctggccgcctgtgccgagggcaaaaacgtctacactgagatcaagtgcacctccctgctgccgctggaggacgtggtgtctgtggtgacgcatgaggactgcatcactgaggtgaaaatggcctatgtgaacttcgtgaaccactgctacgtggacacggaggtggagatgaaggagatctacaccagcaaccacatctggacgctctttgagaacttcaccctggacatggctcgggtctgcagcaagcgtgagaagcgcgtggctgaccccaccttggagaagtacgtgctgagcgttgtgctggacaccatcaacgccttcttcagctccccattctctgagaacagcacttccctgcagacacaccagacgattgtggtgcagctgctgcagtctaccacacgcctcctcgagtgtccgtggctacagcagcagcacaagggctccgtggaggcctgcatccggaccctcgccatggtggccaagggccgggccatcttgctgcccatggacctggatgcccacatcagctcgatgctcagcagtggagccagctgtgcagctgccgcccagcggaacgcctccagctacaaggcaaccacgcgggccttcccccgcgtcacccccaccgccaaccagtgggactacaagaacatcattgagaagctgcaggacatcatcacagccctggaggagcggctgaagcccctggtacaggctgagctgtccgtgctggtggatgtcctgcactggcctgagctgctcttcctggagggcagtgaggcctaccagcgctgcgagagtgggggcttcctgtccaagctgatccagcacaccaaggacctcatggagtcggaggagaagctgtgcatcaaggtgctgcggaccctgcagcagatgctgctcaagaagaccaagtacggggaccggggcaaccagctgcgcaagatgctgctgcaaaactacctccagaaccggaagtccacctcgcggggggaccttcccgaccccataggcactggcctggacccagactggtcggcaatcgcagccacccagtgccggctggacaaggagggggccaccaagttggtatgcgacctcatcaccagcaccaagaacgagaagatcttccaggagagcatcggcctggccatccacctgctggatggtggcaacacagagatccagaaatccttccacaacctgatgatgagtgacaagaagtcagagcgcttcttcaaggtgctgcacgaccgcatgaagcgggcccagcaggagaccaagtccacggtggcagtcaacatgaatgacctgggcagccagccacatgaggaccgcgagccagtcgaccccaccaccaaaggccgcgtggcctccttctcgatacctggctcctcatcccgctactcgctgggccccagcctgcgccgggggcacgaggtgagcgaacgtgtgcagagcagtgagatgggcacatccgtgctcatcatgcagcccatcctgcgctttctgcagctgctgtgtgagaaccacaaccgggacctgcagaacttcctgcgctgtcagaacaacaaaaccaactacaacttggtatgcgagacgctgcagttcctggacatcatgtgcggcagcaccacgggcggcctggggctgctggggctctacatcaatgaggacaacgtgggcctcgtcatccagaccttggagaccctcactgagtactgccagggcccctgccatgagaaccagacttgcattgtgactcacgagtccaatggcatagacatcatcaccgcactgatcctcaatgacatcagccccctgtgcaagtaccgcatggatctggtgctgcagctcaaggacaatgcctccaagctgctcctggctctgatggagagccggcatgacagtgaaaatgctgagcgaatcctcatcagcctgcggccccaggagctggtggacgtcatcaagaaggcctacctgcaggaggaagagcgtgagaactcggaggtgagcccacgtgaagtgggccataacatctatatcctggcgctgcagctctccaggcacaataaacagctgcagcacctgctgaagccggtgaagcgcattcaagaggaggaggccgagggtatctcttccatgctcagcctcaacaacaagcagctgtcacagatgctcaagtcctcagcgccagcacaggaggaggaggaagaccccctggcctactatgagaaccacacgtcccagatcgagattgtgcggcaggaccgcagcatggagcagatcgtgttcccagtgcccggcatctgccagttcctgacggaggaaaccaagcaccggctcttcaccactactgagcaggacgagcagggcagcaaagtgagcgacttcttcgaccagtcctccttcctgcacaacgagatggagtggcagcgcaagctccgcagcatgccgctgatctactggttctcccgccgcatgaccctgtggggcagcatctccttcaacctggccgtgtttatcaacatcatcattgccttcttctacccttacatggagggcgcgtccacaggcgtgctggactcccctctcatctcattgctcttctggatcctcatctgcttctccatcgcggccctgttcaccaagcgctacagcatccgccccctcatcgtggcgctcatcctgcgctccatctactatctgggcatcgggcccacactcaacatcctgggtgccctcaatctgaccaacaagatcgtgtttgtggtgagcttcgtgggcaaccgtggcaccttcatccggggctataaggccatggtcatggacatggaattcctctaccacgtgggctacatcctgaccagtgtcctgggcctctttgctcatgagctgttctacagcatcctgctctttgacctcatctaccgcgaggagacgctgttcaacgtcatcaagagtgtgacccgcaatggccgctccatcctgctgacagccctgctggccctcatcctggtctacctcttctccatcgtcggcttcctcttcctcaaggatgacttcattctcgaggtcgaccggctgcccaacaaccactccacagccagccccctggggatgccacatggagctgctgcatttgtggacacctgcagtggggacaagatggactgtgtctcagggctctcggtgcctgaggtcctggaagaggacagggagctggacagcacagagcgggcctgtgacactctgttgatgtgcatcgtcactgtcatgaaccatgggctacgcaacggtggtggcgtgggcgacattctccgcaagccctccaaagatgagtctctcttcccagcccgagtggtctatgacctcctgttcttcttcatcgtcatcatcattgtgctgaacctcatctttggggtaatcatcgacaccttcgctgacctgcgtagtgagaagcagaagaaggaggagattcttaagacgacatgcttcatctgtggtctggagagggacaagtttgataacaagacagtgtcatttgaggaacacatcaagctggagcacaacatgtggaactacttgtacttcattgtgctggtccgcgtgaagaacaagaccgactacacgggccctgagagctacgtggcccagatgatcaagaacaagaacctggactggttcccccggatgcgggccatgtcccttgtcagcaatgagggcgagggggagcagaatgagattcggattctccaggacaagctcaactccaccatgaagctggtgtcccacctcactgcccagctcaacgagctcaaggagcagatgacggagcagcggaaacgcaggcaacgcctaggctttgtggatgtccagaactgcattagccgctgaggagagccaccgaaggccccaacaggggatgctcatcactggagactgcgactgggaagaacactgccccctccctcgggttgggtggcccagccagctggccagcctccactcccactctgccagacaccctgacacccacccaggctttgaagagcatggagggggagcctcagagctgacagtcctgcttagagcccttaaaaagacttgaaagttcactgggactcagtttaccttaatgccttagcagaagataaatcctacctagagacctttgttccttaaagcaataactgacaactctttgtagtcctccttgtgggtagttaagagtggggtcacccctttaactccaagcactacattttggcggctgccggcctctgggggaggtggcagttatgctgttactagtgattttagggctttgttatttaacttatttcaagggtgctgtgctcagccctgcccatggctgtgcagctccctccgtgcctcagatctgctgtagccagtgcagacctcactgtcgtgtccatgccacccccggcatggctccaggtggcctggtgactccatgatggacgatcttgctcccaggacctgcctcttcccaggcttcctggggaagagttgtacgcccaggcaacaagggctgagctgcgcttgcgtggctgtttcatgaccgcttgtttttctccttttggtgtaatgttttacaaatcctttggcctgagaactaatatgttaattgccttaaataaattaatagaaatctagtccgttaaaaaaaaaaaaaaaaaa

SEQ ID NO: 722 - DNA, 4115 bp, HOMO SAPIENS
gagagaagcgagatttattcctacgtaccgggccgtgctgcttatggcggcgctggagagggggcgctgagctgttgggtatgaagtgtaacagaacagactttaccacctgaaactgctgcttcaagttcagatcaggcaaggaacaaacctcgtaacaactaacaagaccaaagaagagtacacttaagttgaagacacaacacttgatctgaaacaagaagtttgtgcctactcaacagctttgaaagagcacttcccaacgctgctagtagtctttgttttcttcagtgctgtactgtgagattgcccggtacagcagcagttgtattctttattagcttggtagatcattttctctcgctcttttttttaatactagcaactttcatcctttgaaacgtgtgctgaaaaagaagaatcagcaaatactactgaaagtgcaatatttgagtatcactgcgagatgagctttgatccaaaccttctccacaacaatggacataatgggtaccctaatggtacttcagcagcactgcgtgaaactggggttattgaaaaactgttaacctcttacggatttattcagtgttcagaacgtcaagctagacttttcttccactgttcacagtataatggcaacctgcaagacttaaaagtaggagatgatgttgaatttgaagtatcatcggaccgacggactgggaaacccattgctgttaaactggtgaagataaaacaagaaatcctccctgaagaacgaatgaatggacaagttgtgtgcgctgttcctcacaacttagagagtaaatctccagctgccccgggtcagagtccaacagggagtgtatgctacgaacgtaatggggaagtgttttatctgacttacacccctgaagatgtcgaagggaacgttcagctggaaactggagataaaataaactttgtaattgataacaataaacatactggtgctgtaagtgctcgcaacattatgctgttgaaaaagaaacaagcccgctgtcagggagtagtttgtgccatgaaggaggcatttggctttattgaaagaggtgatgttgtaaaagagatattctttcactatagtgaatttaagggtgacttagaaaccttacagcctggcgatgatgtggaattcacaatcaaggacagaaatggtaaagaagttgcaacagatgtcagactattgcctcaaggaacagtcatttttgaagatatcagcattgaacattttgaaggaactgtaaccaaagttatcccaaaagtacccagtaaaaaccagaatgacccattgccaggacgcatcaaagttgactttgtgatccctaaagaacttccctttggagacaaagatacgaaatccaaggtgaccctgctggaaggtgaccatgttaggtttaatatttcaacagaccgacgtgacaaattagagcgagcaaccaatatagaagttctgtcaaatacatttcagttcactaatgaagcccgagaaatgggtgtgattgctgccatgagagatggttttggtttcatcaagtgtgtggatcgtgatgttcgtatgttcttccacttcagtgaaattctggatgggaaccagctccatattgcagatgaagtagagtttactgtggttcctgatatgctctctgctcaaagaaatcatgctattaggattaaaaaacttcccaagggcacggtttcatttcattcccattcagatcaccgttttctgggcacggtagaaaaagaagccactttttccaatcctaaaaccactagcccaaataaaggcaaagagaaggaggctgaggatggcattattgcttatgatgactgtggggtgaaactgactattgcttttcaagccaaggatgtggaaggatctacttctcctcaaataggagataaggttgaatttagtattagtgacaaacagaggcctggacagcaggttgcaacttgtgtgcgacttttaggtcgtaattctaactccaagaggctcttgggttatgtggcaactctgaaggataattttggatttattgaaacagccaatcatgataaggaaatctttttccattacagtgagttctctggtgatgttgatagcctggaactgggggacatggtcgagtatagcttgtccaaaggcaaaggcaacaaagtcagtgcagaaaaagtgaacaaaacacactcagtgaatggcattactgaggaagctgatcccaccatttactctggcaaagtaattcgccccctgaggagtgttgatccaacacagactgagtaccaaggaatgattgagattgtggaggagggcgatatgaaaggtgaggtctatccatttggcatcgttgggatggccaacaaaggggattgcctgcagaaaggggagagcgtcaagttccaattgtgtgtcctgggccaaaatgcacaaactatggcttacaacatcacacccctgcgcagggccacagtggaatgtgtgaaagatcagtttggcttcattaactatgaagtaggagatagcaagaagctctttttccatgtgaaagaagttcaggatggcattgagctacaggcaggagatgaggtggagttctcagtgattcttaatcagcgcactggcaagtgcagcgcctgtaatgtttggcgagtctgtgagggccccaaggctgttgcagctcctcgacctgatcggttggtcaatcgcttgaagaatatcactctggatgatgccagtgctcctcgcctaatggttcttcgtcagccaaggggaccagataactcaatggggtttggtgcagaaagaaagatccgtcaagctggtgtcattgactaaccacatccacaaagcacaccattaatccactatgatcaagttggggggaatctggtgaagggttctgaatatctccctcttcatccctcccgaaatctggaatacttattctattgagctattacaccagttttaacaccttcctcgtgttatgtttaaaaaaataaataaatttaagaaaaccattttaaataatgcacagttgcagcctggaaaaacttaaggtggcgccttatagtatcaattttaggagctttatttggtgcatttaacgcaactggtaattgcagaatccactttgcctgtgtaagtgaaaaatatagactgttatcttgttggccctatgaaattctgcacttttcattatatactctaccttcattaattacttctggcaagatgttctgccttagcactcagttgcattcttttcctttttcttcctgttcattatgctttaattctgaggaccatatgagggtagaatatattatcttttaaaaattacaaaaatttgtataggcaaaccatttcttaaagttgatggccaaattttaaaatgttatttttcatatcatttataatcttgtcacaatccacttaaagaagtttggttatatttcagtgaaaattttcttccagagtaggttttttttcgtgggttggggggtaactttactacaattagtaagtatggtgcagaatttcatgcaaatgaggagtgccagcagtgtgataatttaaacatatttaaacaaaaacaaaaaaaatgaatgcacaaacttgctgctgcttagatcactgcagcttctaggacccggtttcttttactgatttaaaaacaaaacaaaaaaaaataaaaaagttgtgcctgaaatgaatcttgtttttttttataagtagccgcctggttactgtgtcctgtaaaatacagacacttgacccttggtgtagcttctgttcaactttatatcacgggaatggatgggtctgatttcttggccctcttcttgaattggccatatacagggtccctggccagtggactgaaggctttgtctaagatgacaagggtcagctcaggggatgtgggggagggcggttttatcttcccccttgtcgtttgaggttttgatctctgggtaaagaggccgtttatctttgtaaacacgaaacatttttgctttctccagttttctgttaatggcgaaagaatggaagcgaataaagttttactgatttttgagacact

SEQ ID NO: 723 - DNA, 2886 bp, HOMO SAPIENS
agattcctacttcttacgccccccacatcacccgcctcgagacctcaagggtagaggtgggcacccccgcctccgcacttttgctcggggctccagattgtagggcagggcggcgcttctcggaaagcgaaagccggcggggcggggcgggtgccgcaggagaaagaggaagcgctggcagacaatgcgacccgaccgcgctgaggctccaggaccgcccgccatggctgcaggaggtcccggcgcggggtctgcggccccggtctcctccacatcctcccttcccctggctgctctcaacatgcgagtgcggcgccgcctgtctctgttcttgaacgtgcggacacaggtggcggccgactggaccgcgctggcggaggagatggactttgagtacttggagatccggcaactggagacacaagcggaccccactggcaggctgctggacgcctggcagggacgccctggcgcctctgtaggccgactgctcgagctgcttaccaagctgggccgcgacgacgtgctgctggagctgggacccagcattgaggaggattgccaaaagtatatcttgaagcagcagcaggaggaggctgagaagcctttacaggtggccgctgtagacagcagtgtcccacggacagcagagctggcgggcatcaccacacttgatgaccccctggggcatatgcctgagcgtttcgatgccttcatctgctattgccccagcgacatccagtttgtgcaggagatgatccggcaactggaacagacaaactatcgactgaagttgtgtgtgtctgaccgcgatgtcctgcctggcacctgtgtctggtctattgctagtgagctcatcgaaaagaggttggctagaaggccacggggtgggtgccgccggatggtggtggttgtctctgatgattacctgcagagcaaggaatgtgacttccagaccaaatttgcactcagcctctctccaggtgcccatcagaagcgactgatccccatcaagtacaaggcaatgaagaaagagttccccagcatcctgaggttcatcactgtctgcgactacaccaacccctgcaccaaatcttggttctggactcgccttgccaaggccttgtccctgccctgaagactgttctgaggccctgggtgtgtgtgtatctgtctgcctgtccatgtacttctgccctgcctcctcctttcgttgtaggaggaatctgtgctctacttacctctcaattcctggagatgccaacttcacagacacgtctgcagcagctggacatcacatttcatgtcctgcatggaaccagtggctgtgagtggcatgtccacttgctggattatcagccaggacactatagaacaggaccagctgagactaagaaggaccagcagagccagctcagctctgagccattcacacatcttcaccctcagtttcctcacttgaggagtgggatggggagaacagagagtagctgtgtttgaatccctgtaggaaatggtgaagcatagctctgggtctcctgggggagaccaggcttggctgcgggagagctggctgttgctggactacatgctggccactgctgtgaccacgacactgctggggcagcttcttccacagtgatgcctactgatgcttcagtgcctctgcacaccgcccattccacttcctccttccccacagggcaggtggggaagcagtttggcccagcccaaggagaccccaccttgagccttatttcctaatgggtccacctctcatctgcatctttcacacctcccagcttctgcccaaccttcagcagtgacaagtccccaagagactcgcctgagcagcttgggctgcttttcatttccacctgtcaggatgcctgtggtcatgctctcagctccacctggcatgagaagggatcctggcctctggcatattcatcaagtatgagttctggggatgagtcactgtaatgatgtgagcagggagccttcctccctgggccacctgcagagagctttcccaccaactttgtaccttgattgccttacaaagttatttgtttacaaacagcgaccatataaaagcctcctgccccaaagcttgtgggcacatgggcacatacagactcacatacagacacacacatatatgtacagacatgtactctcacacacacaggcaccagcatacacacgtttttctaggtacagctcccaggaacagctaggtgggaaagtcccatcactgagggagcctaaccatgtccctgaacaaaaattgggcactcatctattccttttctcttgtgtccctactcattgaaaccaaactctggaaaggacccaatgtaccagtatttatacctctaatgaagcacagagagaggaagagagctgcttaaactcacacaacaatgaactgcagacacagctgttctctccctctctccttcccagagcaatttatactttaccctcaggctgtcctctggggagaaggtgccatggtcttaggtgtctgtgccccaggacagaccctaggaccctaaatccaatagaaaatgcatatctttgctccactttcagccaggctggagcaaggtaccttttcttaggatcttgggagggaatggatgcccctctctgcatgatcttgttgaggcatttagctgccatgcacctgtccccctttaatactgggcattttaaagccatctcaagaggcatcttctacatgttttgtacgcattaaaataatttcaaagatatctgagaaaagccgatatttgccattcttcctatatcctggaatatatcttgcatcctgagtttataataataaataatattctaccttggaaaaaaaaaaaaaaa

SEQ ID NO: 724 - DNA, 9091 bp, HOMO SAPIENS
ggtgtgcgcgctgcgcccgcgagctcccgggctcggcaaccgtggcatgcttaggattggccatatttaaaagttctgaagtagaacctgcgcctcctctctgcttctccctcctcctcagtaatttatttcgagcttccaggcaagggccacggaagaagggaaagcaagaaattagatgcctgtgtggtaactcctcgcggagctaaggtggactctcttgcagccaacttcccatcagatcaccctgctggacttgcagaccggaatggggctcgcctaaggagccgagcgctgcggaggctgctgcgtgttggatgggagtgggagggggctggagcgagatttccagggcgcagtcctccggggcgttacgccgggcataatggaattgcagaggacgtctagtatctccgggccgctgtcgccggcgtacacggggcaggtgccttacaactacaaccagctggaaggcagattcaagcagctgcaagatgagcgtgaagccgtgcagaagaagaccttcaccaagtgggtcaattcccaccttgcccgtgtgtcctgccggatcacagacctgtacactgaccttcgagatggacggatgctcatcaagctgctggaggtcctctctggagagaggctgcctaaacccaccaagggacgaatgcgcatccactgcttagagaatgtggacaaggcccttcagttcctgaaggagcagagagtccatcttgagaacatggggtcccatgacatcgtggatggaaaccaccggctgacccttggcctcatctggaccatcatcctgcgcttccagatccaggatatcagtgtggaaactgaagacaacaaagagaagaaatctgccaaggatgcattgctgttgtggtgccagatgaagacagctgggtaccccaatgtcaacattcacaatttcaccactagctggagggacggcatggccttcaatgcactgatacacaaacaccggcctgacctgatagattttgacaaactaaagaaatctaacgcacactacaacctgcagaatgcatttaatctggcagaacagcacctcggcctcactaaactgttggaccccgaagacatcagcgtggaccatcctgatgagaagtccataatcacttatgtggtgacttattaccactacttctctaagatgaaggccttagctgttgaaggaaaacgaattggaaaggtgcttgacaatgctattgaaacagaaaaaatgattgaaaagtatgaatcacttgcctctgaccttctggaatggattgaacaaaccatcatcattctgaacaatcgcaaatttgccaattcactggtcggggttcaacagcagcttcaggcattcaacacttaccgcactgtggagaaaccacccaaatttactgagaaggggaacttggaagtgctgctcttcaccattcagagcaagatgagggccaacaaccagaaggtctacatgccccgggaggggaagctcatctctgacatcaacaaggcctgggaaagactggaaaaagcggaacacgaaagagaactggctttgcggaatgagctcataagacaggagaaactggaacagctcgcccgcagatttgatcgcaaggcagctatgagggagacttggctgagcgaaaaccagcgtctggtgtctcaggacaactttgggtttgaccttcctgcagttgaggccgccacaaaaaagcacgaggccattgagacagacattgccgcatacgaggagcgtgtgcaggctgtggtagccgtggccagggagctcgaggccgagaattaccacgacatcaagcgcatcacagcgaggaaggacaatgtcatccggctctgggaatacctactggaactgctcagggcccggagacagcggctcgagatgaacctggggctgcagaagatattccaggaaatgctctacattatggactggatggatgaaatgaaggtgctagtattgtctcaagactatggcaaacacttacttggtgtggaagacctgttacagaagcacaccctggttgaagcagacattggcatccaggcagagcgggtgagaggtgtcaatgcctccgcccagaagttcgcaacagacggggaaggttacaagccctgtgacccccaggtgatccgagaccgcgtggcccacatggagttctgttatcaagagctttgccagctggcggctgagcgcagggcccgtctggaagagtcccgccgcctctggaagttcttctgggagatggcagaagaggaaggctggatacgggagaaggagaagatcctgtcctcggacgattacgggaaagacctgaccagcgtcatgcgcctgctcagcaagcaccgggcgttcgaggacgagatgagcggccgcagtggccactttgagcaggccatcaaggaaggcgaagacatgatcgcggaggagcacttcgggtcggagaagatccgtgagaggatcatttacatccgggagcagtgggccaacctagagcagctctcggccattcggaagaagcgcctggaggaggcctccctgctgcaccagttccaggcagatgctgatgacattgatgcctggatgctggacatcctcaagattgtctccagcagcgacgtgggccacgatgagtattccacacagtctctggtcaagaaacacaaggacgtggcggaagagatcgccaattacaggcccacccttgacacgctgcacgaacaagccagcgccctcccccaggagcatgccgagtctccagacgtgaggggcaggctgtcgggcatcgaggagcggtataaggaggtggcagagctgacgcggctgcggaagcaggcactccaggacactctggccctgtacaagatgttcagcgaggctgatgcctgtgagctctggatcgacgagaaggagcagtggctcaacaacatgcagatcccagagaagctggaggatctggaggtcatccagcacagatttgagagcctagaaccagaaatgaacaaccaggcttcccgggttgcagtggtgaaccagattgcacgccagctgatgcacagcggccacccaagtgagaaggaaatcaaagcccagcaggacaaactcaacacaaggtggagccagttcagagaactggttgacaggaagaaggatgccctcctgtctgccctgagcatccagaactaccacctcgagtgcaatgaaaccaaatcctggattcgggaaaagaccaaggtcatcgagtccacccaggacctgggcaatgacctggctggcgtcatggccctgcagcgcaagctgaccggcatggagcgggacttggtggccattgaggcaaagctgagtgacctgcagaaggaggcggagaagctggagtccgagcaccccgaccaggcccaggccatcctgtctcggctggccgagatcagcgacgtgtgggaggagatgaagaccaccctgaaaaaccgagaggcctccctgggagaggccagcaagctgcagcagttcctacgggacttggacgacttccagtcctggctctctaggacccagacagcgatcgcctcggaggacatgccaaacaccctgaccgaggctgagaagctgctcacgcagcacgagaacatcaagaacgagatcgacaactacgaggaggactaccagaagatgagggacatgggcgagatggtcacccaggggcagaccgatgcccagtacatgtttctgcggcagcggctgcaggccctggacactggatggaacgagctccacaagatgtgggagaacagacaaaatctcctatcccagtcacatgcctaccagcagttcctcagagacacgaagcaagccgaagcctttcttaacaaccaggagtatgttctggctcacactgaaatgcctaccaccttggaaggagctgaagcagcaattaaaaagcaagaggacttcatgaccaccatggacgccaatgaggagaagatcaatgctgtggtggagactggccggaggctggtgagcgatgggaacatcaactcagatcgcatccaggagaaggtggactctattgatgacagacataggaagaatcgtgagacagccagtgaacttttgatgaggttgaaggacaacagggatctacagaaattcctgcaagattgtcaagagctgtctctctggatcaatgagaagatgctcacagcccaggacatgtcttacgatgaagccagaaatctgcacagtaaatggttgaagcatcaagcatttatggcagaacttgcatccaacaaagaatggcttgacaaaatcgagaaggaaggaatgcagctcatttcagaaaagcctgagacggaagctgtggtgaaggagaaactcactggtttacataaaatgtgggaagtccttgaatccactacccagacaaaggcccagcggctctttgatgcaaacaaggccgaacttttcacccagagctgtgcagatctagacaaatggctgcacggcctggagagtcagattcagtctgatgactatggcaaagacctgaccagtgtcaatatcctgctgaaaaagcaacagatgctggagaatcagatggaagtgcggaagaaggagatcgaagagctccaaagccaagcccaggccctgagtcaggaagggaagagcaccgacgaggtagacagcaagcgcctcaccgtgcagaccaagttcatggagttgctggagcccttgaacgagaggaagcataacctgctggcctccaaagagatccatcagttcaacagggatgtggaggacgagatcttgtgggttggagagaggatgcctttggcaacttccacggatcatggccacaacctccagactgtgcagctgttaataaagaaaaatcagaccctccagaaagaaatccaggggcaccagcctcgcattgacgacatctttgagaggagccaaaacatcgtcactgacagcagcagcctcagcgctgaggccatcagacagaggcttgccgacctgaagcagctgtggggtctcctcattgaggagacagagaaacgccacaggcggctggaggaggcgcacagggcccagcagtactactttgacgctgctgaggccgaagcctggatgagcgagcaggagctgtacatgatgtcagaggagaaggccaaggatgagcagagtgctgtctccatgttgaagaagcaccagatcttagaacaagctgtggaggactatgcagagaccgtgcatcagctctccaagaccagccgggccctggtggccgacagccatcctgaaagtgagcgcattagcatgcggcagtccaaagtggataaactgtacgctggtctgaaagaccttgctgaagagagaagaggcaagctggatgagagacacaggttattccagctcaaccgggaggtggacgacctggagcagtggatcgctgagagggaggtggtcgcagggtcccatgaactgggacaggactatgagcatgtcacgatgttacaagaacgattccgggagtttgcccgagacaccgggaacattgggcaggagcgcgtggacacggtcaatcacctggcagatgagctcatcaactctggacattcagatgccgccaccatcgctgaatggaaggatggcctcaatgaagcctgggccgacctcctggagctcattgacacaagaacacagattcttgccgcttcctatgaactgcacaagttttaccacgatgccaaggagatctttgggcgtatacaggacaaacacaagaaactccctgaggagcttgggagagatcagaacacagtggagaccttacagagaatgcacactacatttgagcatgacatccaggctctgggcacacaggtgaggcagctgcaggaggatgcagcccgcctccaggcggcctatgcgggtgacaaggccgacgatatccagaagcgcgagaacgaggtcctggaagcctggaagtccctcctggacgcctgtgagagccgcagggtgcggctggtggacacaggggacaagttccgcttcttcagcatggtgcgcgacctcatgctctggatggaggatgtcatccggcagatcgaggcccaggagaagccaagggatgtatcatctgttgaactcttaatgaataatcatcaaggcatcaaagctgaaattgatgcacgtaatgacagtttcacaacctgcattgaacttgggaaatccctgttggcgagaaaacactatgcatctgaggagatcaaggaaaaattactgcagttgacggaaaagaggaaagaaatgatcgacaagtgggaagaccgatgggaatggttaagactgattctggaggtccatcagttctcaagagacgccagtgtggccgaggcctggctgcttggacaggagccgtacctatccagccgagagataggccagagcgtggacgaggtggagaagctcatcaagcgccacgaggcatttgaaaagtctgcagcaacctgggatgagaggttctctgccctggaaaggctgactacattggagttactggaagtgcgcagacagcaagaggaagaggagaggaagaggcggccgccttctcccgagccgagcacgaaggtttcagaggaagccgagtcccagcagcagtgggatacttcaaaaggagaacaagtttcccaaaacggtttgccagctgaacagggatctccacgggttagttaccgctctcaaacctaccaaaactacaaaaactttaatagcagacggacagccagtgaccagccatggtctggactgtgaagttcactaccatttgtcaagaatcaccctttccaaatcctctgggttttgactttttggcttccacttcacccaaaatgttaaaatttttacttaattcatagccttccttggtttcatatttgtttgcatttaattcatgtttgagtctcttaactgatggatgcccacttgccttaaagcagcatacttattttttgtttatttattgtgagctttttactttattaagattttacagcgaaacccttacatgagtaattgaaatgaaattaaatgagattacagcataatgaagaagaaaactagaatctaacaggtatgacacattcagttattctaacagggcacagtactgtgctatatgtagccgcctttacagatgttattaacctatagtagtttactattaactaggaagactggtgtatgaggagggagacattctgtaataagattaaaacctaaagtcagctgtgtaacattccatgaaagatgcattcatttattgaagatgacaaaaaagggagtcagatatattctggaagctattttaattttaggcacacaatctcatacattttgagacccttgggtcatttattactttttacaaactagttcctctctttttttctgccaagtcctgaattgaaaactgtaggcttccttgcacagatgttgcagccagcctcaggagtaaagtgcccgctgactgctgccgccacctctgtctcgctccctgtcagtgctgctggcacgtgggacgcggcaggtgacagccgttctcagcatgttttagaagcttgcctcacagacttccatgcctctccattcagccgatgacttcagggtgtcaaactgttttaatttttcaaacaaatggaacagaagccattgtggttcatcctgattacttgaacgttgcacttggtggaccgtgcctgggagcgctcgcatgccccctggcttcagaagtcatgtcagtgtctctgtagacaaactccactgtacatcttggattaatcttctgattcattgttcattttctcaagactttttgtggaattctctgataaaggaagcttttaggatggtatctatcaggccaccagcaggaattgaaaatgttttcacaaaaatccttttccttagaaataaaagctggtgacagagatggtttccttgtaccgataaaaacaaaaccaaatccatattatacatcaaaaccttgtgagacattcacttgctcttttgccatatttagatgtgtcagtggaatcagaaacctgttttgatatgtgttctctatgagttaagtctgatttgtctttttatttcatgatgcatgtcttttttttcttttgtcaggataacgtcatatagcatcttgtttgtttttccttatctctatgtacatatctatctacttctgactgtagatgggtatatagatagatgccaagcttcttatgttctgggggtagtatgcatcattattgggtctctgccttaaaacacatcaaaattcattttagacaaaaaaacttctgctttgtctttggtcattagggagctctaatgtgtgtttgtggctccaagttacattttgtgtttcattgatctatatgtatatatgtgatgttttcatatatatatgtgtgtgtgtttaaattttgtatcatcaggactgacacccaatttgacactttttgtatctagaagaccctccaaaaaaggaaccacataagcacacaagaaaagagtgctatgatgttcttagcatttgctatcatgcctatttttatctagatttttaaatgtagcttgtcataacaaaattttaattacaattggcttgtatgagaagaaaaagtatttttattgttttgagtgatgacgcagagactcagtgaacttgaaaatagcattgcttcgtgcactttgaataccaatcaggtgttttctgtgctactagttgtcacgttgcattcatgttcacctcctgatttaagtatctcgggtgtgcccagccactaaagcactctggactaatcgctaaagagaagcaacgtggggggtggggttgcgagggatgtgttcacatgtacccatcatttgatcatagcactgtgattgcttttgatgtgtgtctctagtggtgtgctgtctgttggcatgcttaaagcacatgtccattaaaattcattttgttccttttaaaaaaaaaaaaaaaaa

SEQ ID NO: 725 - DNA, 2742 bp, HOMO SAPIENS
gggcctcggccctggtccaaagtctacccgcctccttgtgacagaagtgcgactgccagctgccgaggcgttcggtcctgctgttgcggccgctgccccagggctgcggggacgctcccggagccctgcctgttccctgtccatccaggccagcagctgaaggagcctcacctgcctcccttctctgagtagcacggatttgaggagaagcagcgaagatgtccagcgagcctccccctccttatcctgggggccccacagccccacttctggaagagaaaagtggagccccgcccaccccaggccgttcctccccagctgtgatgcagccccctccaggcatgccactgccccctgcggacattggccccccaccctatgagccgccgggtcacccaatgccccagcctggcttcatcccaccacacatgagtgcagatggcacctacatgcctccgggtttctaccctcctccaggcccccacccacccatgggctactaccccccagggccctacacgccagggccctaccctggccctgggggccacacagccacagtcctggtcccttcaggagctgccaccacggtgacagtgctgcagggagagatctttgagggagcgcctgtgcagacggtgtgtccccactgccagcaggccatcaccaccaagatctcctacgagattggcttgatgaatttcgtgctgggtttcttctgttgcttcatgggatgtgatctgggctgctgcctgatcccctgcctcatcaatgacttcaaggatgtgacgcacacatgccccagctgcaaagcctacatctacacgtacaagcgcctgtgctaacggagctgggactcgggactcccccgcctgtcagtctggccccctgtgctttgctccctgtgctcagtggtcactttcccgctcccacttggggctgggagccgtgccaccatcccctagaagtcctgtcctcttcaccctgccctacctgagccgctgactcttctggcaaaaattctgttgggatttaaggccaagggtcagtgggtggcagggggctgacaatgagcttgtgtgttgttggtctgcttggtgtgtgtgatcgggaagataagctgggaggggtctcctgctggggtcctgatgcctctgtttccaaacaaggtacaggttcagtccagactctttccccctgggaccaacagcagccagagcagttagccagttagtccccaggcctgtggccacaggcgtttctgacctgctgggccgagaatgggtaagttgtctggagtcaggtgggcccacgtaggacagggtcacaaagcctgggtttgtttctgggtactttgcgcctctggggtgctagaggtggggcatggtggctggaagtaaaactgccaactctggccctcagaactctcaggtatagaagcccaggatgtctaataccctgtcccagtgcccgagagctgcctggtgtcaggtagagaggacactgtacctgggtgaatgatcagaccctggtagctaagaaggaacttgtccctttgagtcagtgtgcagaccccctttcaggccatgcctctgtgaaccctgtattgctggggccggaaggagcccctgagcctagccccttcccgtctgccctgtgtcctcactgcgtgtgggtatgacctctgcctggtggctggtgtatcccaactgggcaagagatggcagagggtcccccttgtgggtgcgcttggatgtgcagagccttctccatggattttcttccctgtaagtgccgggcccctcaccccagctgacaggctgttgctgtgcctgctcacacctgctcctgcaggcacactgggctagggacgaggaaggagcagccacaagtggtagaactgccttggtggacaccagcctcgccctgtctttatttcctgaatggtttgtgaacttgctcacctggaccactgtatcctgccactgtccttcctggtctcgcactgccactgcatggcctcctgtcactgtgaatcgtggcccagtctcagtttgtagtttctcattaaattggccctttcactcccccgccctgggcctctgctctcttgcctggcttccttcttttttgagggaaagagggtggggctgcaggcagtctactggcaggacgggaggctgagtcctcagggtctcacaccctcagtgctgatgccatgccaactgcctgggacaacaccaacacgtaaggacctaattaaaccaaaccagagtcgggtgtagaccagccctgggatttccagctgtgactgggccagggcacacgttggtctcggcagtggctgtaaggtcaccttccttcctctgatgctggtttcaaccatctatatatggcatccacgcatgggatctgcaagctggagccctcctacccgcaggcttgagcacagcatcatccagccctggggaggcgcacccttaagcaacacagactgggctgaggctgacaggcagaagactaacagagcgcagtctgcacacgcaggttctgggcgacctctggccctggccatctctgcactaactcatctgaattatgaaggtggcagtcttggtcagtagtttaaagagtttccctactttttaaccctttttgaaataaaacttttacaggtagtagattcctattaataaaattatttaagttcatgtttctcttttagagaatgaattgtttaaa

SEQ ID NO: 726 - DNA, 2445 bp, HOMO SAPIENS
acctcgttcatctccttcacctccgaaatgatctcgcttttgggtttacggccggtctcttcacctggagcatcagccgggaaggtcagggtcgccctggctcgggcctgttcacattggggtcaaaggcacacattgggggctcaaccaaggcgagctgcgttcgcggggccgggtctttccgcacaggcggagggcggtggcgggcgcggaggcgtcgcgcgagccagggggcagccacgggccgggggtacctagcgccacccgcttcgcttgcatcagctgcgcgccccatcccgaggaatggtagaggcagccccgcccccggcccgcccccgcctttccattggctgccgcgcggggcggggagcggggtcggctcagtggccctgagaccctagctctgctctcggtccgctcgctgtccgctagcccgctgcgatgttgcgcgctgccgcccgcttcgggccccgcctgggccgccgcctcttgtcagccgccgccacccaggccgtgcctgcccccaaccagcagcccgaggtcttctgcaaccagattttcataaacaatgaatggcacgatgccgtcagcaggaaaacattccccaccgtcaatccgtccactggagaggtcatctgtcaggtagctgaaggggacaaggaagatgtggacaaggcagtgaaggccgcccgggccgccttccagctgggctcaccttggcgccgcatggacgcatcacacaggggccggctgctgaaccgcctggccgatctgatcgagcgggaccggacctacctggcggccttggagaccctggacaatggcaagccctatgtcatctcctacctggtggatttggacatggtcctcaaatgtctccggtattatgccggctgggctgataagtaccacgggaaaaccatccccattgacggagacttcttcagctacacacgccatgaacctgtgggggtgtgcgggcagatcattccgtggaatttcccgctcctgatgcaagcatggaagctgggcccagccttggcaactggaaacgtggttgtgatgaaggtagctgagcagacacccctcaccgccctctatgtggccaacctgatcaaggaggctggctttccccctggtgtggtcaacattgtgcctggatttggccccacggctggggccgccattgcctcccatgaggatgtggacaaagtggcattcacaggctccactgagattggccgcgtaatccaggttgctgctgggagcagcaacctcaagagagtgaccttggagctgggggggaagagccccaacatcatcatgtcagatgccgatatggattgggccgtggaacaggcccacttcgccctgttcttcaaccagggccagtgctgctgtgccggctcccggaccttcgtgcaggaggacatctatgatgagtttgtggagcggagcgttgcccgggccaagtctcgggtggtcgggaacccctttgatagcaagaccgagcaggggccgcaggtggatgaaactcagtttaagaagatcctcggctacatcaacacggggaagcaagagggggcgaagctgctgtgtggtgggggcattgctgctgaccgtggttacttcatccagcccactgtgtttggagatgtgcaggatggcatgaccatcgccaaggaggagatcttcgggccagtgatgcagatcctgaagttcaagaccatagaggaggttgttgggagagccaacaattccacgtacgggctggccgcagctgtcttcacaaaggatttggacaaggccaattacctgtcccaggccctccaggcgggcactgtgtgggtcaactgctatgatgtgtttggagcccagtcaccctttggtggctacaagatgtcggggagtggccgggagttgggcgagtacgggctgcaggcatacactgaagtgaaaactgtcacagtcaaagtgcctcagaagaactcataagaatcatgcaagcttcctccctcagccattgatggaaagttcagcaagatcagcaacaaaaccaagaaaaatgatccttgcgtgctgaatatctgaaaagagaaatttttcctacaaaatctcttgggtcaagaaagttctagaatttgaattgataaacatggtgggttggctgagggtaagagtatatgaggaaccttttaaacgacaacaatactgctagctttcaggatgatttttaaaaaatagattcaaatgtgttatcctctctctgaaacgcttcctataactcgagtttataggggaagaaaaagctattgtttacaattatatcaccattaaggcaactgctacaccctgctttgtattctgggctaagattcattaaaaactagctgctcttaaaaaaaaaaaaaaaaaaaaaaaaaaaaaaaaaaaaaaaaaaaaaaa

SEQ ID NO: 727 - DNA, 8283 bp, HOMO SAPIENS
aagtgccgtttcggtttaatctagtgtgtgactgggtctgtgtgagggagagagtgtgtgtggtgtggaggtgaaacggaggcaagaaagggggctacctcaggagcgagggacaaagggggcgtgaggcacctaggccgcggcaccccggcgacaggaagccgtcctgaaccgggctaccgggtaggggaagggcccgcgtagtcctcgcagggccccagagctggagtcggctccacagccccgggccgtcggcttctcacttcctggacctccccggcgcccgggcctgaggactggctcggcggagggagaagaggaaacagacttgagcagctccccgttgtctcgcaactccactgccgaggaactctcatttcttccctcgctccttcaccccccacctcatgtagaagggtgctgaggcgtcgggagggaggaggagcctgggctaccgtccctgccctccccacccccttcccggggcgctttggtgggcgtggagttggggttgggggggtgggtgggggttgctttttggagtgctggggaacttttttcccttcttcaggtcaggggaaagggaatgcccaattcagagagacatgggggcaagaaggacgggagtggaggagcttctggaactttgcagccgtcatcgggaggcggcagctctaacagcagagagcgtcaccgcttggtatcgaagcacaagcggcataagtccaaacactccaaagacatggggttggtgacccccgaagcagcatccctgggcacagttatcaaacctttggtggagtatgatgatatcagctctgattccgacaccttctccgatgacatggccttcaaactagaccgaagggagaacgacgaacgtcgtggatcagatcggagcgaccgcctgcacaaacatcgtcaccaccagcacaggcgttcccgggacttactaaaagctaaacagaccgaaaaagaaaaaagccaagaagtctccagcaagtcgggatcgatgaaggaccggatatcgggaagttcaaagcgttcgaatgaggagactgatgactatgggaaggcgcaggtagccaaaagcagcagcaaggaatccaggtcatccaagctccacaaggagaagaccaggaaagaacgggagctgaagtctgggcacaaagaccggagtaaaagtcatcgaaaaagggaaacacccaaaagttacaaaacagtggacagcccaaaacggagatccaggagcccccacaggaagtggtctgacagctccaaacaagatgatagcccctcgggagcttcttatggccaagattatgaccttagtccctcacgatctcatacctcgagcaattatgactcctacaagaaaagtcctggaagtacctcgagaaggcagtcggtcagtcccccttacaaggagccttcggcctaccagtccagcacccggtcaccgagcccctacagtaggcgacagagatctgtcagtccctatagcaggagacggtcgtccagctacgaaagaagtggctcttacagcgggcgatcgcccagtccctatggtcgaaggcggtccagcagccctttcctgagcaagcggtctctgagtcggagtccactccccagtaggaaatccatgaagtccagaagtagaagtcctgcatattcaagacattcatcttctcatagtaaaaagaagagatccagttcacgcagtcgtcattccagtatctcacctgtcaggcttccacttaattccagtctgggagctgaactcagtaggaaaaagaaggaaagagcagctgctgctgctgcagcaaagatggatggaaaggagtccaagggttcacctgtatttttgcctagaaaagagaacagttcagtagaggctaaggattcaggtttggagtctaaaaagttacccagaagtgtaaaattggaaaaatctgccccagatactgaactggtgaatgtaacacatctaaacacagaggtaaaaaattcttcagatacagggaaagtaaagttggatgagaactccgagaagcatcttgttaaagatttgaaagcacagggaacaagagactctaaacccatagcactgaaagaggagattgttactccaaaggagacagaaacatcagaaaaggagacccctccacctcttcccacaattgcttctcccccaccccctctaccaactactacccctccacctcagacaccccctttgccacctttgcctccaataccagctcttccacagcaaccacctctgcctccttctcagccagcatttagtcaggttcctgcttccagtacttcaactttgcccccttctactcactcaaagacatctgctgtgtcctctcaggcaaattctcagccccctgtacaggtttctgtgaagactcaagtatctgtaacagctgctattccacacctgaaaacttcaacgttgcctcctttgcccctcccacccttattacctggagatgatgacatggatagtccaaaagaaactcttccttcaaaacctgtgaagaaagagaaggaacagaggacacgtcacttactcacagaccttcctctccctccagagctccctggtggagatctgtctcccccagactctccagaaccaaaggcaatcacaccacctcagcaaccatataaaaagagaccaaaaatttgttgtcctcgttatggagaaagaagacaaacagaaagcgactgggggaaacgctgtgtggacaagtttgacattattgggattattggagaaggaacctatggccaagtatataaagccaaggacaaagacacaggagaactagtggctctgaagaaggtgagactagacaatgagaaagagggcttcccaatcacagccattcgtgaaatcaaaatccttcgtcagttaatccaccgaagtgttgttaacatgaaggaaattgtcacagataaacaagatgcactggatttcaagaaggacaaaggtgccttttaccttgtatttgagtatatggaccatgacttaatgggactgctagaatctggtttggtgcacttttctgaggaccatatcaagtcgttcatgaaacagctaatggaaggattggaatactgtcacaaaaagaatttcctgcatcgggatattaagtgttctaacattttgctgaataacagtgggcaaatcaaactagcagattttggacttgctcggctctataactctgaagagagtcgcccttacacaaacaaagtcattactttgtggtaccgacctccagaactactgctaggagaggaacgttacacaccagccatagatgtttggagctgtggatgtattcttggggaactattcacaaagaagcctatttttcaagccaatctggaactggctcagctagaactgatcagccgactttgtggtagcccttgtccagctgtgtggcctgatgttatcaaactgccctacttcaacaccatgaaaccgaagaagcaatatcgaaggcgtctacgagaagaattctctttcattccttctgcagcacttgatttattggaccacatgctgacactagatcctagtaagcggtgcacagctgaacagaccctacagagcgacttccttaaagatgtcgaactcagcaaaatggctcctccagacctcccccactggcaggattgccatgagttgtggagtaagaaacggcgacgtcagcgacaaagtggtgttgtagtcgaagagccacctccatccaaaacttctcgaaaagaaactacctcagggacaagtactgagcctgtgaagaacagcagcccagcaccacctcagcctgctcctggcaaggtggagtctggggctggggatgcaataggccttgctgacatcacacaacagctgaatcaaagtgaattggcagtgttattaaacctgctgcagagccaaaccgacctgagcatccctcaaatggcacagctgcttaacatccactccaacccagagatgcagcagcagctggaagccctgaaccaatccatcagtgccctgacggaagctacttcccagcagcaggactcagagaccatggccccagaggagtctttgaaggaagcaccctctgccccagtgatcctgccttcagcagaacagacgacccttgaagcttcaagcacaccagctgacatgcagaatatattggcagttctcttgagtcagctgatgaaaacccaagagccagcaggcagtctggaggaaaacaacagtgacaagaacagtgggccacaggggccccgaagaactcccacaatgccacaggaggaggcagcagagaagaggccccctgagccccccggacctccaccgccgccacctccaccccctctggttgaaggcgatctttccagcgccccccaggagttgaacccagccgtgacagccgccttgctgcaacttttatcccagcctgaagcagagcctcctggccacctgccacatgagcaccaggccttgagaccaatggagtactccacccgaccccgtccaaacaggacttatggaaacactgatgggcctgaaacagggttcagtgccattgacactgatgaacgaaactctggtccagccttgacagaatccttggtccagaccctggtgaagaacaggaccttctcaggctctctgagccaccttggggagtccagcagttaccagggcacagggtcagtgcagtttccaggggaccaggacctccgttttgccagggtccccttagcgttacacccggtggtcgggcaaccattcctgaaggctgagggaagcagcaattctgtggtacatgcagagaccaaattgcaaaactatggggagctggggccaggaaccactggggccagcagctcaggagcaggccttcactgggggggcccaactcagtcttctgcttatggaaaactctatcgggggcctacaagagtcccaccaagagggggaagagggagaggagttccttactaacccagagacttcagtgtcctgaaagattcctttcctatccatccttccatccagttctctgaatctttaatgaaatcatttgccagagcgaggtaatcatctgcatttggctactgcaaagctgtccgttgtattccttgctcacttgctactagcaggcgacttacgaaataatgatgttggcaccagttccccctggatgggctatagccagaacatttacttcaactctaccttagtagatacaagtagagaatatggagaggatcattacattgaaaagtaaatgttttattagttcattgcctgcacttactgatcggaagagagaaagaacagtttcagtattgagatggctcaggagaggctctttgatttttaaagttttggggtgggggattgtgtgtggtttctttcttttgaattttaatttaggtgttttgggtttttttcctttaaagagaatagtgttcacaaaatttgagctgctctttggcttttgctataagggaaacagagtggcctggctgatttgaataaatgtttctttcctctccaccatctcacattttgcttttaagtgaacactttttccccattgagcatcttgaacatactttttttccaaataaattactcatccttaaagtttactccactttgacaaaagatacgcccttctccctgcacataaagcaggttgtagaacgtggcattcttgggcaagtaggtagactttacccagtctctttccttttttgctgatgtgtgctctctctctctctttctctctctctctctctctctctctctctctctctctctctgtctcgcttgctcgctctcgctgtttctctctctttgaggcatttgtttggaaaaaatcgttgagatgcccaagaacctgggataattctttactttttttgaaataaaggaaaggaaattcagactcttacattgttctctgtaactcttcaattctaaaatgttttgttttttaaaccatgttctgatggggaagttgatttgtaagtgtggacagcttggacattgctgctgagctgtggttagagatgatgcctccattcctagagggctaataacagcatttagcatattgtttacacatatatttttatgtcaaaaaaaaaacaaaaacctttcaaacagagcattgtgatattgtcaaagagaaaaacaaatcctgaagatacatggaaatgtaacctagtttagggtgggtatttttctgaagatacatcaatacctgaccttttttaaaaaaataattttaaaacagcatactgtgaggaagaacagtattgacatacccacatcccagcatgtgtaccctgccagttcttttagggatttttcctccaaagagatttggatttggttttggtaaaaggggttaaattgtgcttccaggcaagaactttgccttatcataaacaggaaatgaaaaagggaagggctgtcaggatgggataatttgggaggcttctcattctggcttctatttctatgtgagtaccagcatatagagtgttttaaaaacagatacatgtcatataatttatctgcacagacttagaccttcaggaaacataggttaagcccccttttacaaagaaaaagtaaacatacttcagcatcttggagggtagttttcaaaactcaagtttcatgtttcaatgccaagttcttattttaaaaaataaaatctacttataagagaaaggtgcattacttaaaaaaaaaaaactttaaagaaatgaaagaagaaccctcttcagatacttacttgaagactgttttcccctgttaatgagatatagctagatatcggtgtgtgtatttctttattattctctggtttttgatctggccttgcctccagggccaaacactgatttagaaagagagccttctagctattttggcattgatggctttttataccagtgtgtccagttagatttactaggcttactgacatgctattggtaaatcgcattaaagttcatctgaaccttctgtctgttgacttcttagtcctcagacatgggcctttgtgttttagaatatttgaatttgagttattgggccccactccctgttttttattaaagaacgtgagcctgggatactttcagaagtatctgttcaatgaaaaaaagttggtttcccatcaaatatgaataaaattctctatatatttcattgtattttggttatcagcagtcatcaataatgtttttccctcccctctcccacctcttatttttaattatgccaaatatcctaaataatatacttaagcctccattccctcatccctactagggaagggggtgagtgtatgtgtgagtgtatgtgtatgtatgatcccatctcacccccacccccattttgggagtcttttaaaatgaaaacaaagtttggtagttttgactatttctaaaagcagaggagaaaaaaaaacttatttaaatatcctggaatctgtatggaggaagaaaaggtatttgttaatttttcagttacgttatctataaacatgatggaagtaaaggtttggcagaatttcaccttgactatttgaaaattacagacccaattaattccattcaaaagtggttttcgttttgttttaattattgtacaatgagagatattgtctattaaatacattattttgaacagatgagaaatctgattctgttcatgagtgggaggcaaaactggtttgaccgtgatcatttttgtggttttgaaaacaaatatacttgacccagtttccttagttttttcttcaactgtccataggaacgataagtatttgaaagcaacatcaaatctatacgtttaaagcagggcagttagcacaaatttgcaagtagaacttctattagcttatgccatagacatcacccaaccacttgtatgtgtgtgtgtatatataatatgcatatatagttaccgtgctaaaatggttaccagcaggttttgagagagaatgctgcatcagaaaagtgtcagttgccacctcattctccctgatttaggttcctgacactgattcctttctctctcgtttttgacccccattgggtgtatcttgtctatgtacagatattttgtaatatattaaatttttttctttcagtttataaaaatggaaagtggagattggaaaattaaatatttcctgttactataccaaaaaaaaaaaaaaaaaaaaa

SEQ ID NO: 728 - DNA, 3637 bp, HOMO SAPIENS
agtcctgggcgaagggggcggtggttccccgcggcgctgcgcgcggcggtaattagtgattgtcttccagcttcgcgaaggctaggggcgcggctgccgggtggctgcgcggcgctgcccccggaccgaggggcagccaacccaatgaaaccaccgcgtgttcgcgcctggtagagatttctcgaagacaccagtgggcccgttccgagccctctggaccgcccgtgtggaaccaaacctgcgcgcgtggccgggccgtgggacaacgaggccgcggagacgaaggcgcaatggcgaggaagttatctgtaatcttgatcctgacctttgccctctctgtcacaaatccccttcatgaactaaaagcagctgctttcccccagaccactgagaaaattagtccgaattgggaatctggcattaatgttgacttggcaatttccacacggcaatatcatctacaacagcttttctaccgctatggagaaaataattctttgtcagttgaagggttcagaaaattacttcaaaatataggcatagataagattaaaagaatccatatacaccatgaccacgaccatcactcagaccacgagcatcactcagaccatgagcgtcactcagaccatgagcatcactcagaccacgagcatcactctgaccatgatcatcactctcaccataatcatgctgcttctggtaaaaataagcgaaaagctctttgcccagaccatgactcagatagttcaggtaaagatcctagaaacagccaggggaaaggagctcaccgaccagaacatgccagtggtagaaggaatgtcaaggacagtgttagtgctagtgaagtgacctcaactgtgtacaacactgtctctgaaggaactcactttctagagacaatagagactccaagacctggaaaactcttccccaaagatgtaagcagctccactccacccagtgtcacatcaaagagccgggtgagccggctggctggtaggaaaacaaatgaatctgtgagtgagccccgaaaaggctttatgtattccagaaacacaaatgaaaatcctcaggagtgtttcaatgcatcaaagctactgacatctcatggcatgggcatccaggttccgctgaatgcaacagagttcaactatctctgtccagccatcatcaaccaaattgatgctagatcttgtctgattcatacaagtgaaaagaaggctgaaatccctccaaagacctattcattacaaatagcctgggttggtggttttatagccatttccatcatcagtttcctgtctctgctgggggttatcttagtgcctctcatgaatcgggtgtttttcaaatttctcctgagtttccttgtggcactggccgttgggactttgagtggtgatgcttttttacaccttcttccacattctcatgcaagtcaccaccatagtcatagccatgaagaaccagcaatggaaatgaaaagaggaccacttttcagtcatctgtcttctcaaaacatagaagaaagtgcctattttgattccacgtggaagggtctaacagctctaggaggcctgtatttcatgtttcttgttgaacatgtcctcacattgatcaaacaatttaaagataagaagaaaaagaatcagaagaaacctgaaaatgatgatgatgtggagattaagaagcagttgtccaagtatgaatctcaactttcaacaaatgaggagaaagtagatacagatgatcgaactgaaggctatttacgagcagactcacaagagccctcccactttgattctcagcagcctgcagtcttggaagaagaagaggtcatgatagctcatgctcatccacaggaagtctacaatgaatatgtacccagagggtgcaagaataaatgccattcacatttccacgatacactcggccagtcagacgatctcattcaccaccatcatgactaccatcatattctccatcatcaccaccaccaaaaccaccatcctcacagtcacagccagcgctactctcgggaggagctgaaagatgccggcgtcgccactctggcctggatggtgataatgggtgatggcctgcacaatttcagcgatggcctagcaattggtgctgcttttactgaaggcttatcaagtggtttaagtacttctgttgctgtgttctgtcatgagttgcctcatgaattaggtgactttgctgttctactaaaggctggcatgaccgttaagcaggctgtcctttataatgcattgtcagccatgctggcgtatcttggaatggcaacaggaattttcattggtcattatgctgaaaatgtttctatgtggatatttgcacttactgctggcttattcatgtatgttgctctggttgatatggtacctgaaatgctgcacaatgatgctagtgaccatggatgtagccgctgggggtatttctttttacagaatgctgggatgcttttgggttttggaattatgttacttatttccatatttgaacataaaatcgtgtttcgtataaatttctagttaaggtttaaatgctagagtagcttaaaaagttgtcatagtttcagtaggtcatagggagatgagtttgtatgctgtactatgcagcgtttaaagttagtgggttttgtgatttttgtattgaatattgctgtctgttacaaagtcagttaaaggtacgttttaatatttaagttattctatcttggagataaaatctgtatgtgcaattcaccggtattaccagtttattatgtaaacaagagatttggcatgacatgttctgtatgtttcagggaaaaatgtctttaatgctttttcaagaactaacacagttattcctatactggattttaggtctctgaagaactgctggtgtttaggaataagaatgtgcatgaagcctaaaataccaagaaagcttatactgaatttaagcaaagaaataaaggagaaaagagaagaatctgagaattggggaggcatagattcttataaaaatcacaaaatttgttgtaaattagaggggagaaatttagaattaagtataaaaaggcagaattagtatagagtacattcattaaacatttttgtcaggattatttcccgtaaaaacgtagtgagcacttttcatatactaatttagttgtacatttaactttgtataatacagaaatctaaatatatttaatgaattcaagcaatatatcacttgaccaagaaattggaatttcaaaatgttcgtgcgggtatataccagatgagtacagtgagtagttttatgtatcaccagactgggttattgccaagttatatatcaccaaaagctgtatgactggatgttctggttacctggtttacaaaattatcagagtagtaaaactttgatatatatgaggatattaaaactacactaagtatcatttgattcgattcagaaagtactttgatatctctcagtgcttcagtgctatcattgtgagcaattgtcttttatatacggtactgtagccatactaggcctgtctgtggcattctctagatgtttcttttttacacaataaattccttatatcagcttgaaaaaaaaaaaaaaaaaa

SEQ ID NO: 729 - DNA, 1985 bp, HOMO SAPIENS
agaggggctaggctctgggattcaagatggaggcgctgagtcgagctgggcaggagatgagcctagcggccctgaagcaacacgacccctatatcaccagcatcgcagacctcacgggccaggtcgctctgtacaccttctgccccaaggccaaccagtgggagaagactgatatagaagggaccttattcgtatatcgaaggtcagcttccccttaccatggttttaccattgtgaatcgactaaatatgcacaatctagttgaaccagtgaataaagatttggaatttcagctccatgaaccatttcttctgtatagaaatgcaagcttgtcgatatatagtatctggttttatgacaagaatgactgtcaccgcatagcaaaactcatggctgatgtggtagaagaggagacacggcgatcccagcaagctgctcgggacaaacagagtcccagccaggccaatggctgcagcgaccacaggcccatcgacatcctggagatgctgagcagagccaaggatgagtatgagaggaatcagatgggtgactcaaatatctccagccctgggttacagccaagcactcagctctccaatctgggaagcaccgagactctagaagaaatgccctccgggtcacaggataagtctgctccatctggacacaagcatctgacggtagaagagttatttggaacctctttgccaaaggaacaaccagcagttgtgggtctggattcagaagaaatggagaggttgccaggagatgcctcccagaaagagcccaattcattcctaccatttccctttgagcagttaggaggagcccctcaatcagaaaccctgggtgtcccttctgctgcccaccattcagtccagcctgaaatcaccaccccggtgctaatcactccagcctccatcacacagtccaatgaaaagcatgctccaacctacacaatcccgttgagccctgttctcagtcccactctgccagctgaagctcctactgcacaggttccccccagcttacctcgaaacagcaccatgatgcaggcagtgaagaccacgcctagacagaggtctccactcctgaaccagccagtccctgagctaagccatgccagtctgattgccaaccagagccccttcagggccccattgaacgtgacgaacacagctggcacatccctcccaagcgttgatcttctccagaaactcaggttgaccccacagcatgaccaaatacagacacaaccacttgggaaaggtgcaatggtagccagcttttctccggcagctggtcagctagccacacctgagagcttcatagagcctccctctaagacagcagcagcaagagtggcggcctcagcctccctgagcaacatggtgcttgctccccttcagtctatgcagcagaaccaggatcctgaagtatttgtgcagcctaaggtgttatccagtgccatcccggttgcaggcgccccactggttactgcaacgaccactgcagtgtcttcagtcctgctggccccaagtgttttccagcagacagttacaagatcttcggaccttgagaggaaagccagctccccttctcctctaactattggaacgccagaaagtcagagaaagccttccattattctcagcaagtctcagctccaggatacattaatacatctaataaagaatgattccagcttcctcagtacacttcatgaagtctacttgcaggttctgaccaagaacaaagacaaccacaacctatgactggagcagaataagtctaaaggcagagccccagcctcagagacaaataggcttcatcatggaaacttctgagcagaacattgagtttgagaatcctgaaattgagcctatgagaaagagactcatttcttaagaatgttttccaagtgacattctcagtggtaatggaggtttcactgtgaagcatcaccagcagatccttgttttgac

SEQ ID NO: 730 - DNA, 9530 bp, HOMO SAPIENS
cggggccagggcagcgcggactcgcgtcccgtggagcgttccaggcgggcgcgcggctttctccccagacccaccgagtggcggcggaggcgagatgcgcgggggcgtgctcctggtcttgctgctgtgtgtcgccgcgcagtgccggcagagaggcctgtttcctgccattctcaatcttgccagcaatgctcacatcagcaccaatgccacctgtggcgagaaggggccggagatgttctgcaaacttgtggagcatgtgccaggtcggcccgtccgaaacccacagtgccggatctgtgatggcaacagcgcaaaccccagagaacgccatccaatatcacatgccatagatggcaccaataactggtggcaaagtcccagcattcagaatgggagagaatatcactgggtcacaatcactctggacttaagacaggtctttcaagttgcatatgtcatcattaaagctgccaatgcccctcgacctggaaactggattttggagcgttctctggatggcaccacgttcagcccctggcagtattatgcagtcagcgactcagagtgtttgtctcgttacaatataactccaagacgagggccacccacctacagggctgatgatgaagtgatctgcacctcctattattccagattggtgccacttgagcatggagagattcatacatcactcatcaatggcagaccaagcgctgacgatctttcacccaagttgttggaattcacttctgcacgatatattcgccttcgcttgcaacgcattagaacgctcaatgcagatctcatgacccttagccaccgggaacctaaagaactggatcctattgttaccagacgctattattattcaataaaggacatttctgttggaggcatgtgtatctgctatggccatgctagtagctgcccatgggatgaaactacaaagaaactgcagtgtcaatgtgagcataatacttgcggggagagctgtaacaggtgctgtcctgggtaccatcagcagccctggaggccgggaaccgtgtcctccggcaatacatgtgaagcatgtaattgtcacaataaagccaaagactgttactatgatgaaagtgttgcaaagcagaagaaaagtttgaatactgctggacagttcagaggaggaggggtttgcataaattgcttgcagaacaccatgggaatcaactgtgaaacctgtattgatggatattatagaccacacaaagtgtctccttatgaggatgagccttgccgcccctgtaattgtgaccctgtggggtccctcagttctgtctgtattaaggatgacctccattctgacttacacaatgggaagcagccaggtcagtgcccatgtaaggaaggttatacaggagaaaaatgtgatcgctgccaacttggctataaggattacccgacctgtgtctcctgtgggtgcaacccagtgggcagtgccagtgatgagccctgcacagggccctgtgtttgtaaggaaaacgttgaggggaaggcctgtgatcgctgcaagccaggattctataacttgaaggaaaaaaacccccggggctgctccgagtgcttctgctttggcgtttctgatgtctgcagcagcctctcttggcctgttggtcaggtaaacagtatgtccgggtggctggtcaccgacttgatcagtcccaggaagatcccgtctcagcaagatgcactaggcgggcgccatcaggtcagcatcaacaacaccgcggtcatgcagagactggctcccaagtactactgggcagcccccgaggcctaccttggaaataagctgactgcgtttggcggattcctgaaatacacggtgtcctacgatattccggtagagacggtagacagtaacctcatgtcgcatgctgacgtcatcattaagggaaacggactcactttaagcacacaggctgagggtctgtcattgcagccttatgaagagtacctaaacgtggttagacttgtgcctgaaaacttccaagattttcacagcaaaaggcagattgatcgtgaccagctgatgactgtccttgccaatgtgacacatcttttgatcagagccaactacaattctgcaaaaatggctctttacaggttggagtccgtctctctggacatagccagctctaatgccatcgacctggtggtggccgctgatgtggagcactgtgaatgtccgcaaggctacacagggacctcctgtgagtcgtgcctctctggctattaccgcgtggatggaatactctttggaggaatttgtcaaccctgtgaatgccacggccatgcagctgagtgtaatgttcacggcgtttgcattgcgtgtgcgcacaacaccaccggcgtccactgtgagcagtgcttgcccggcttctacggggagccttcccgagggacacctggggactgccagccctgcgcctgccctctcaccatagcctccaacaatttcagccccacctgccacctcaatgatggagatgaagtggtctgtgactggtgtgccccgggctactcaggagcttggtgtgagagatgtgcagatggttactatggaaacccaacagtgcctggcgaatcttgtgttccctgtgactgcagcggcaacgtggacccctcggaggctggtcactgtgactcagtcaccggggagtgcctgaagtgcctggggaacacagatggcgcccactgtgaaaggtgtgctgacgggttctatggggacgctgtgacagccaagaactgccgcgcctgtgaatgccatgtgaaaggctcccattctgccgtgtgccatcttgagaccgggctctgtgactgcaaaccaaacgtgactggacagcagtgtgaccagtgcttgcatggctattatgggctggactcaggccatggctgccggccctgcaactgcagcgtggcaggctccgtgtcagatggctgcacggatgaaggccagtgtcactgtgtcccaggtgtggcagggaaaaggtgtgacaggtgtgcccatggcttctacgcctaccaggatggtagctgtacaccctgtgactgcccacacactcagaatacctgcgacccagaaactggagagtgtgtctgcccccctcacacacagggtgtgaagtgtgaagaatgtgaggatgggcactggggctacgatgcggaggtggggtgccaggcctgcaattgcagtctcgtggggtcgactcatcatcggtgcgatgtggtcaccggccattgccagtgcaagtcaaaatttggtggccgggcctgcgatcagtgttccttgggttacagagactttcccgactgtgttccctgtgactgtgacctgagggggacgtcgggggacgcctgcaacctggagcagggtctctgcggctgtgtggaggaaaccggggcctgcccttgcaaggaaaatgtctttggtcctcagtgcaacgaatgtcgagagggcaccttcgctctccgcgcagacaaccccctgggctgcagcccgtgcttctgctccgggctgtcccacctctgctcagagctggaggactacgtgaggaccccagtaacgctgggctccgatcagcctcttctgcgtgtggtttctcagagtaacttgaggggcacgaccgagggggtttactaccaggcccccgacttcctgctggatgccgccaccgtccggcagcacatccgtgcagagccgttttactggcggctgccgcagcagttccaaggagaccagctcatggcctatggtggcaaactgaagtacagcgtggccttctattctttggatggcgtcggcacctccaattttgagcctcaagttctcatcaaaggtggtcggatcagaaagcaagtcatttacatggatgcaccagccccagagaatggagtgagacaggaacaagaagtagcaatgagagagaatttttggaaatattttaactctgtttctgaaaaacctgtcacgcgagaggattttatgtctgtcctcagcgatattgagtacatcctcatcaaggcatcgtatggtcaaggattacagcagagcagaatctcagacatttcaatggaggttggcagaaaggctgaaaagctgcacccagaagaagaggttgcatctcttttagagaattgtgtctgtcctcctggcactgtgggattctcatgtcaggactgcgcccctgggtaccacagagggaagctcccagcagggagtgacaggggaccacgccctctggttgctccttgtgttccctgcagttgcaacaaccacagtgacacctgtgaccccaacaccgggaagtgtctgaactgtggcgataacacagcaggtgaccattgtgatgtgtgtacttctggctactacgggaaggtgactggctcagcaagtgactgtgctctgtgtgcctgtcctcacagccctcctgccagttttagtcccacttgtgtcttggaaggggaccacgatttccgttgtgacgcctgtctcctgggctatgaaggaaaacactgtgaaaggtgctcctcaagctattatgggaaccctcaaacaccaggtggcagttgccagaagtgtgactgcaacccgcacggctctgtccacggtgactgtgaccgcacatctgggcagtgcgtttgcaggctgggggcctcggggctccggtgcgatgagtgtgaaccgaggcacattctgatggaaacagattgtgtttcctgtgatgatgagtgtgtaggtgtgctgctgaatgacttggatgagattggtgatgccgttctttctctgaacctcactggcattatccctgtcccatatggaattttgtcaaacctggaaaatacaactaaatatctccaggaatctttattaaaagaaaatatgcaaaaggacctgggaaaaattaagcttgaaggtgttgcagaagaaacggacaacctgcaaaagaagctcactaggatgttagcgagtacccaaaaggtgaatagggcaactgagagaatcttcaaggagagtcaagacctggccatagccattgagaggctgcagatgagcatcacagaaattatggaaaagacaactttaaatcagactttggatgaagatttcctactacccaattctactcttcagaacatgcaacagaatggtacatctttgctagaaatcatgcagataagagacttcacacagttgcaccaaaatgccacccttgaactcaaggctgctgaagatttattgtcacaaattcaggaaaattaccagaagccgctggaagaattggaggtattgaaagaagcagcaagccacgtcctttcaaagcacaacaatgaactaaaggcggctgaggcgctcgtgagggaagctgaggcaaagatgcaggaaagcaaccacctgctgctcatggtcaatgctaatctgagagaattcagtgataaaaagctgcatgttcaagaagaacaaaatctgacctcagagctcattgtccaaggaagaggattgatagatgctgctgctgcacaaacagatgctgtacaagatgctctagagcacttagaggatcaccaggataagctacttttatggtctgccaaaatcaggcaccacatagatgacctggtcatgcacatgtcccaaaggaacgcagtcgacctggtctacagagctgaggaccatgccgctgagttccagagactagcagatgttctgtacagtggccttgaaaacatcagaaatgtgtccctgaatgccaccagtgcagcctatgtccattacaacatccagagcctgattgaagaatcggaggaactggccagagatgctcacaggactgtgactgagacgagcctgctctcagaatcccttgtttctaacgggaaagcggccgtgcagcgcagctccagatttctaaaagaaggcaacaacctcagcaggaagcttccaggtattgcattggaactgagtgaattgagaaataagacaaacagatttcaagagaatgctgttgaaattaccaggcaaaccaatgaatcactcttgatacttagagcaattcctaaaggtataagagacaagggagccaaaaccaaagagctggccacgtctgcaagccagagcgcggtgagcacgctgagggacgtggcggggctgagccaggagctgctgaacacatctgccagcctgtccagggtcaacaccacattacgagagacacaccagcttctgcaggactccaccatggccactctgttggctggaagaaaagtcaaagacgtggaaattcaagccaaccttttgtttgatcggttgaagcctttgaagatgttagaggagaatctgagcagaaacctatcagaaattaaactgttgatcagccaggcccgcaaacaagcagcttctattaaagtcgccgtgtctgcagacagagattgcatccgggcctaccagcctcagatttcctctaccaactacaataccttaacactaaatgttaagacacaggaacccgataatcttctcttctacctcggtagcagcaccgcttctgatttccttgcagtggagatgcggcgagggagagtggccttcctgtgggacctgggctccgggtccacacgcttggagtttccagactttcccattgatgacaacagatggcacagtatccatgtagccagatttggaaacattggttcactgagtgtaaaggaaatgagctcaaatcaaaagtcaccaacaaaaacaagtaaatcccctgggacagctaatgttctggatgtaaacaattcaacactcatgtttgttggaggtcttggaggacaaatcaagaaatctcctgctgtgaaggttactcattttaaaggctgcttgggggaggccttcctgaatggaaaatccataggcctatggaactatattgaaagggaaggcaagtgccgtgggtgcttcggaagctcccagaatgaagacccttccttccattttgacgggagtgggtactctgtcgtggagaagtcacttccggctaccgtgacccagataatcatgctttttaataccttttcacctaatggacttcttctctacctgggttcatacggcacaaaagactttttatccatcgagctgtttcgtggcagagtgaaggttatgactgacctgggttcaggacccattacccttttgacagacagacgttataacaatggaacctggtacaaaattgccttccagcgaaaccggaagcaaggagtgctagcagttatcgatgcctataacaccagtaataaagaaaccaagcagggcgagactccgggagcatcttctgacctcaaccgcctagacaaggacccgatttatgtgggtggattaccaaggtcaagagttgtaaggagaggtgtcaccaccaaaagctttgtgggctgcatcaagaacctggaaatatccagatcaacctttgacttactcagaaattcctatggagtgagaaaaggctgtttactggagcccatccggagtgttagcttcctgaaaggcggctacattgaattgccacccaaatctttgtcaccagaatcagaatggctggtaacatttgccaccacgaacagcagtggcatcatcctggctgccctcggcggggatgtggagaagcggggtgatcgtgaggaagcacacgtgcccttcttttccgtcatgctgatcggaggcaacattgaggtacatgtcaatcctggggatgggacaggcctgagaaaagctctcctgcacgctcccacgggtacctgcagtgatggacaagcgcattccatctccttggtcaggaatcggagaattatcactgtccaattggatgagaacaatcctgtggaaatgaagttgggcacattagtagaaagcaggacgataaatgtgtccaatctgtacgtcgggggaattccagagggagaggggacgtcactgctcacaatgagaagatcgttccatggctgtatcaaaaacctgatcttcaatttggaacttttggatttcaacagtgcagttggccatgagcaagtcgacctggacacctgctggctgtcagaaaggcctaagctggctcccgatgcagaggacagcaagctcttgccagagccccgggcttttccagaacagtgtgtggtggatgcagctctggagtacgttcccggcgctcaccagtttggtctcacacaaaacagccatttcatcttgccttttaatcagtcggctgtcagaaagaagctctcggttgagctaagcatccgcacgttcgcctccagcggcctgatttactacatggctcatcagaaccaagcagactacgctgtgctccagctgcacgggggccgcctccacttcatgtttgaccttggcaaaggcagaacaaaggtctctcaccctgcactgctcagtgatggcaagtggcacacggtcaagacagactatgttaaaagaaaaggcttcataactgtcgacggccgagagtctcccatggtgactgtggtgggagatggaaccatgctggatgtggagggtttgttctacctaggaggcctgccctcccagtaccaggccaggaaaattggaaatatcacccacagcatccctgcctgcattggggatgtgacggttaacagcaaacagctggacaaggacagcccggtgtctgccttcacggtgaacaggtgctacgcagtggcccaggaaggaacatactttgacggaagcggatatgcagctcttgtcaaagagggctacaaagtccagtcagatgtgaacatcacactggagtttcgaacctcctcgcagaatggcgtcctcctggggatcagcactgccaaagtggatgccattggactagagcttgtggacggcaaggtcttgttccatgtcaacaatggtgctggcaggataacagctgcatatgagcccaaaaccgccactgtgctctgtgatggaaaatggcacactcttcaagctaacaaaagcaaacaccgtatcactctgattgttgacgggaacgcagttggcgctgaaagtccacacacccagtctacctcagtggacaccaacaatcccatttatgttggtggctatcctgctggtgtgaagcaaaaatgcctgcgcagccagacctcgttccgcgggtgtttgaggaagctagctctgattaagagcccgcaggtgcagtcctttgacttcagcagagcgttcgaactgcacggagttttccttcattcctgtcctgggaccgagtcctgaacttcaagcagaatcctcagttggaatcattgctaatattttgaggagaagtgtatgtgtgaattaagaatctcttcagttcatatttcatttccaactcaggttaagtgtttctggggagagatgttgtgtttacgttacactaaaaccacatgtgcaacaaatacctccattaaatggtctaaaatgtaaaaaaaaaaaaaaaaaa

SEQ ID NO: 731 - DNA, 2441 bp, HOMO SAPIENS
gcggggccaagatggcgccgagcgccgggtgagcagcgtctcggctgccgctagagttttcctgctccccgcgctcgggtggcgggggcgggtctgagtggtaccccggaggagaccctttgaaggtcccttgtggggactggaaagaggacgggtctccgtctctccaccgggggcttcatccttccagggaggagaagagggactccagaatggctgaggagaagaagctgaagcttagcaacactgtgctgccctcggagtccatgaaggtggtggctgaatccatgggcatcgcccagattcaggaggagacctgccagctgctaacggatgaggtcagctaccgcatcaaagagatcgcacaggatgccttgaagttcatgcacatggggaagcggcagaagctcaccaccagtgacattgactacgccttgaagctaaagaatgtcgagccactctatggcttccacgcccaggagttcattcctttccgcttcgcctctggtgggggccgggagctttacttctatgaggagaaggaggttgatctgagcgacatcatcaatacccctctgccccgggtgcccctggacgtctgcctcaaagctcattggctgagcatcgagggctgccagccagctatccccgagaacccgcccccagctcccaaagagcaacagaaggctgaagccacagaacccctgaagtcagccaagccaggccaggaggaagacggacccctgaagggcaaaggtcaaggggccaccacagccgacggcaaagggaaagagaagaaggcgccgcccttgctggagggggcccccttgcgactgaagccccggagcatccacgagttgtctgtggagcagcagctctactacaaggagatcaccgaggcctgcgtgggctcctgcgaggccaagagggcggaagccctgcaaagcattgccacggaccctggactgtatcagatgctgccacggttcagtacctttatctcggagggggtccgtgtgaacgtggttcagaacaacctggccctactcatctacctgatgcgtatggtgaaagcgctgatggacaaccccacgctctatctagaaaaatacgtccatgagctgattccagctgtgatgacctgcatcgtgagcagacagttgtgcctgcgaccagatgtggacaatcactgggcactccgagactttgctgcccgcctggtggcccagatctgcaagcattttagcacaaccactaacaacatccagtcccggatcaccaagaccttcaccaagagctgggtggacgagaagacgccctggacgactcgttatggctccatcgcaggcttggctgagctgggacacgatgttatcaagactctgattctgccccggctgcagcaggaaggggagcggatccgcagtgtgctggacggccctgtgctgagcaacattgaccggattggagcagaccatgtgcagagcctcctgctgaaacactgtgctcctgttctggcaaagctgcgcccaccgcctgacaatcaggacgcctatcgggcagaattcgggtcccttgggcccctcctctgctcccaggtggtcaaggctcgggcccaggctgctctgcaggctcagcaggtcaacaggaccactctgaccatcacgcagccccggcccacgctgaccctctcgcaggccccacagcctggccctcgcacccctggcttgctgaaggttcctggctccatcgcacttcctgtccagacactggtgtctgcacgagcggctgccccaccacagccttcccctcctccaaccaagtttattgtaatgtcatcgtcctccagcgccccatccacccagcaggtcctgtccctcagcacctcggcccccggctcaggttccaccaccacttcgcccgtcaccaccaccgtccccagcgtgcagcccatcgtcaagttggtctccaccgccaccaccgcaccccccagcactgctccctctggtcctgggagtgtccagaagtacatcgtggtctcacttcccccaacaggggagggcaaaggaggccccacctcccatccttctccagttcctcccccggcatcgtccccgtccccactcagcggcagtgccctttgtggggggaagcaggaggctggggacagtccccctccagctccagggactccaaaagccaatggctcccagcccaactccggctcccctcagcctgctccgtgatgctccacctgccagcccccggattcccacacatgcagacatgtacacacgtgcacgtacacacatgcatgctcgctaagcggaaggaagttgtagattgcttccttcatgtcactttctttttagatattgtacagccagtttctcagaataaaagtttggtttgtaagttctgaaaaaaaaaaaaaaaaaaaa

SEQ ID NO: 732 - DNA, 6348 bp, HOMO SAPIENS
aattaattttacttaggataagtgttgttattattgtttttattgttgttctgttagttactcaaaacttcattctaattgtgccctgagtttgttaaaataccatactgtatttttgtgtaacatgtaaataggcattaatttttgagaaatagaaatgtttatccttaatgtatttttaatttgctaacattgattttttattttctttcctgaaatagcttatttcctaaaatgaaagaatttattctcagatgaataatttttatatcagctattcttatcagagcaataaacaaataccaatgatgcgctcagccaacaattcattacactctctgaagagtaactggacaaggagaaaaacatagggaaaaaaccaacagaatttgttggcatgttctacacacagaccatggcttttcagaagccaagctgaatcaaaacagttttaaaagaggcaaccatttgtagaggagtccttgaaggattcttcattgttttcttggacaaaaagagaccagtggatccaagtgcttcaaatacttctctcttattttcttaactctattgctctgcaatatttactttaccctgttaatgaacaggacaaaatggttaaaaaagagataagcgtgcgtcaacaaattcaggctcttctgtacaagaattttcttaaaaaatggagaataaaaagagagtttattggaatggacaataacattgtttctagggctatatttgtgcatcttttcggaacacttcagagctacccgttttcctgaacaacctcctaaagtcctgggaagcgtggatcagtttaatgactctggcctggtagtggcatatacaccagtcagtaacataacacaaaggataatgaataagatggccttggcttcctttatgaaaggaagaacagtcattgggacaccagatgaagagaccatggatatagaacttccaaaaaaataccatgaaatggtgggagttatatttagtgatactttctcatatcgcctgaagtttaattggggatatagaatcccagttataaaggagcactctgaatacacagaacactgttgggccatgcatggtgaaattttttgttacttggcaaagtactggctaaaagggtttgtagcttttcaagctgcaattaatgctgcaattatagaagtcacaacaaatcattctgtaatggaggagttgacatcagttattggaataaatatgaagataccacctttcatttctaagggagaaattatgaatgaatggtttcattttacttgcttagtttctttctcttcttttatatactttgcatcattaaatgttgcaagggaaagaggaaaatttaagaaactgatgacagtgatgggtctccgagagtcagcattctggctctcctggggattgacatacatttgcttcatcttcattatgtccatttttatggctctggtcataacatcaatcccaattgtatttcatactggcttcatggtgatattcacactctatagcttatatggcctttctttgatagcattggctttcctcatgagtgttttaataaggaaacctatgctcgctggtttggctggatttctcttcactgtattttggggatgtctgggattcactgtgttatatagacaacttcctttatctttgggatgggtattaagtcttcttagcccttttgccttcactgctggaatggcccagattacacacctggataattacttaagtggtgttatttttcctgatccctctggggattcatacaaaatgatagccacttttttcattttggcatttgatactcttttctatttgatattcacattatattttgagcgagttttacctgataaagatggccatggggattctccattatttttccttaagtcctcattttggtccaaacatcaaaatactcatcatgaaatctttgagaatgaaataaatcctgagcattcctctgatgattcttttgaaccggtgtctccagaattccatggaaaagaagccataagaatcagaaatgttataaaagaatataatggaaagactggaaaagtagaagcattgcaaggcatattttttgacatatatgaaggacagatcactgcaatacttgggcataatggagctggtaaatcaacactgctaaacattcttagtggattgtctgtttctacagaaggatcagccactatttataatactcaactctctgaaataactgacatggaagaaattagaaagaatattggattttgtccacagttcaattttcaatttgacttcctcactgtgagagaaaacctcagggtatttgctaaaataaaagggattcagccaaaggaagtggaacaagaggtaaaaagaattataatggaattagacatgcaaagcattcaagacattattgctaaaaaattaagtggtgggcagaagagaaaactaacactagggattgccatcttaggagatcctcaggttttgctgctagatgaaccaactgctggattggatcccttttcaagacaccgagtgtggagcctcctgaaggagcataaagtagaccgacttatcctcttcagtacccaattcatggatgaggctgacatcttggctgataggaaagtatttctgtctaatgggaagttgaaatgtgcaggatcatctttgtttctgaagcgaaagtggggtattggatatcatttaagtttacacaggaatgaaatgtgtgacacagaaaaaatcacatcccttattaagcagcacattcctgatgccaagttaacaacagaaagtgaagaaaaacttgtatatagtttgcctttggaaaaaacgaacaaatttccagatctttacagtgaccttgataagtgttctgaccagggcataaggaattatgctgtttcagtgacatctctgaatgaagtattcttgaacctagaaggaaaatcagcaattgatgaaccagattttgacattgggaaacaagagaaaatacatgtgacaagaaatactggagatgagtctgaaatggaacaggttctttgttctcttcctgaaacaagaaaggctgtcagtagtgcagctctctggagacgacaaatctatgcagtggcaacacttcgcttcttaaagttaaggcgtgaaaggagagctcttttgtgtttgttactagtacttggaattgcttttatccccatcattctagagaagataatgtataaagtaactcgtgaaactcattgttgggagttttcacccagtatgtatttcctttctctggaacaaatcccgaagacgcctcttaccagcctgttaatcgttaataatacaggatcaaatattgaagacctcgtgcattcactgaagtgtcaggatatagttttggaaatagatgactttagaaacagaaatggctcagatgatccctcctacaatggagccatcatagtgtctggtgaccagaaggattacagattttctgttgcgtgtaataccaagaaattgaattgttttcctgttcttatgggaattgttagcaatgcccttatgggaatttttaacttcacggagcttattcaaatggagagcacttcattttctcgtgatgacatagtgctggatcttggttttatagatgggtccatatttttgttgttgatcacaaactgcgtttctccttttatcggcatgagcagcatcagcgattataaaaaaaatgttcaatcccagttatggatttcaggcctctggccttcagcatactggtgtggacaggctctggtggacattccattatacttcttgattctcttttcaatacatttaatttactacttcatatttctgggattccagctttcatgggaactcatgtttgttttggtggtatgcataattggttgtgcagtttctcttatattcctcacatatgtgctttcattcatctttcgcaagtggagaaaaaataatggcttttggtcttttggcttttttattatcttaatatgtgtatccacaattatggtatcaactcaatatgaaaaactcaacttaattttgtgcatgattttcataccttccttcactttgctggggtatgtcatgttattgatccagctcgactttatgagaaacttggacagtctggacaatagaataaatgaagtcaataaaaccattcttttaacaaccttaataccataccttcagagtgttattttcctttttgtcataaggtgtctggaaatgaagtatggaaatgaaataatgaataaagacccagttttcagaatctctccacggagtagagaaactcatcccaatccggaagagcccgaagaagaagatgaagatgttcaagctgaaagagtccaagcagcaaatgcactcactgctccaaacttggaggaggaaccagtcataactgcaagctgtttacacaaggaatattatgagacaaagaaaagttgcttttcaacaagaaagaagaaaatagccatcagaaatgtttccttttgtgttaaaaaaggtgaagttttgggattactaggacacaatggagctggtaaaagtacttccattaaaatgataactgggtgcacaaagccaactgcaggagtggtggtgttacaaggcagcagagcatcagtaaggcaacagcatgacaacagcctcaagttcttggggtactgccctcaggagaactcactgtggcccaagcttacaatgaaagagcacttggagttgtatgcagctgtgaaaggactgggcaaagaagatgctgctctcagtatttcacgattggtggaagctcttaagctccaggaacaacttaaggctcctgtgaaaactctatcagagggaataaagagaaagctgtgctttgtgctgagcatcctggggaacccatcagtggtgcttctagatgagccgttcaccgggatggaccccgaggggcagcagcaaatgtggcagatacttcaggctaccgttaaaaacaaggagaggggcaccctcttgaccacccattacatgtcagaggctgaggctgtgtgtgaccgtatggccatgatggtgtcaggaacgctaaggtgtattggttccattcaacatctgaaaaacaagtttggtagagattatttactagaaataaaaatgaaagaacctacccaggtggaagctctccacacagagattttgaagcttttcccacaggctgcttggcaggaaagatattcctctttaatggcgtataagttacctgtggaggatgtccaccctctatctcgggcctttttcaagttagaggcgatgaaacagaccttcaacctggaggaatacagcctctctcaggctaccttggagcaggtattcttagaactctgtaaagagcaggagctgggaaatgttgatgataaaattgatacaacagttgaatggaaacttctcccacaggaagacccttaaaatgaagaacctcctaacattcaattttaggtcctactacattgttagtttccataattctacaagaatgtttccttttacttcagttaacaaaagaaaacatttaataaacattcaataatgattacagttttcatttttaaaaatttaggatgaaggaaacaaggaaatatagggaaaagtagtagacaaaattaacaaaatcagacatgttattcatccccaacatgggtctattttgtgcttaaaaataatttaaaaatcatacaatattaggttggttatcggttattatcaataaagctaacactgagaacattttacaaataaaaatatgaggtttttagcctgaacttcaaatgtatcagctatttttaaacattatttactcggattctaatttaatgtgacattgactataagaaggtctgataaactgatgaaatggcacagcataacatttaattataatgacattctgattataaaataaatgcatgtgaattttagtacatattgaagttatatggaagaagatagccataatctgtaagaaagtaccgcagttaatattttctttagccaacttatattcaatgtattttttatggatcctttttcaaaggtagtatcagtaggcatagtcattttctgtatcttttcacctcacagttcatgaacatttcccatgtcattatagcacttttgtgttatataattgctgcattaatgttatagctgtattgatgtaataccagagttgttacgttcgggttatatgcaagtttatttcttagaaataaaactttgatggacttttaaaaaaaaaaaaaaaaa

SEQ ID NO: 733 - DNA, 2147 bp, HOMO SAPIENS
ggcctactgagggtcacaagggagatgtccgcccccagtcgtagcctcggacggtttctgagcgttggtgtttggcacgcgccaccctctcttgctttggttccgccatgccgatgtaccaggtaaaaccttatcacgggcgcggcgcgcctctccgtgtggagcttcccacctgcatgtaccggctctctaacgtgcaaggcaggagcggcggcccagcgcccggcgttggccacctacagtctttggtagatgagtggctggatagctacaagcaagaccaggatgcaggatttctggagcttgttaactttttcatctgatcttgtggatgtaaaggactcgggggactatcctctgacagctccaggtctatcctggaagaagttccagggcagcttctgtgagtttgtggggacattggtctgtcggtgccagtacatcctcctccatgatgacttccctatggacaacctcatctccctgctcactggcttctcagactcacaagtctgcgccttctgtcacactagcaccctggctgctatgaaactgatgacctccctggtaagagttgccctccaactgagtctgcaccaagatatcaatcagcgtcagtatgaggctgaaagaaacaaggggccagggcagagggcacctgagcggctggagagcctgttggagaaacacaaagagctgcattaatactacattgtcaaagacaaagacgaacatgagacatgcgatatgagttttaaaaggagagaagagcaaaaaaacaatacagctatccaaggagcaagtgctgagcttgtgaaaaaacagcttctattttattaaataatagtgttcctgcagggatgtctgaagtactctgcaaggctaattaggacagatcaatgtacacttacctctccagaaggctgaaaggtgtgtagtgactatgtgtcattaaaaatttacttgaccatgggcaacagatgtccatgaaagaatgaccctggtgagtgctctaagttttcattttactcatgtcatcctcaatgcatcataaatgccatagacaccattactatcacgtaggctcatagcagctgatgtgctgtatatgcttgagagggtggtatcaattaactatattatctataaagccatacttgcaattactaccacttcacaatttatcattaacgcatttggcagatttttttttctccaaagtaacatttatttaaaggtttatcaaaattcttagtacagcatttattataatgtgatttttgataattgactaaatcagtggctcttaaaaacaccctcatctcagtcccgctcagtatacaccacagtgccatttggggaaaagaaatacatattagaaatgttcatttcagacctcgtcatggaagatcatatattaatgtaatcaggtggtacgtttacatgctcattagtaatccatcattagtccaaatgctcactattaggaataaatgtacaacgagttattcagaatacccagaaagagtatttcttatttaaacattcaggacaagctgactgaaataagtgcacaccttgaatttgaactttcaaggcacatcactaaagtcaatcagttatgtcaggacactcttctataataatctcaattataaaattcctgcctctccctaacacaggagttggagggagttccaatatctgaatctttctaattcactgtaactgcaaaaaaatcttgatgaagtgtgtatttaaatttcatgccttaatacatagcatgccactaaaaccacattagttatgctttatgctgcttaatcatacgtcaaaatctgtaaaatctgctcttgcatgctaaggtaatttaactgcaattaatcaattaagaaaaataaaatgtaataaatgccaaataatgtaacttcttttaaacagaccactatctacacatttattccccaaatacttattagctgacaccatataaggaaaacataataaaaagtagacttcactgagcctttctcccattggtagcttgctctaaacttacaaatgttttagagaattctttggcatgatctgactttccaactaaaatgtgagcaacttgaaaaaaaaaaaaaaaaaaggccacatgt

SEQ ID NO: 734 - DNA, 1700 bp, HOMO SAPIENS
cgcccccggacaccgctgtccggctcccgggctgtcctcagcaagggcgcggtctggtactcgtgcgtcttttatcgcctcagtttccctccgccgactagcgcgcggggcccggttctccatcgcgcgcacggcagcctagcgcaatgaggcgggcagcactgcggctttgtgccttgggcaaagggcagcttactcctggaagaggactgactcaaggaccccagaaccccaagaaacagggaatcttccacattcatgaagttcgagataagttgcgggagatagtaggagcatccacaaactggagagaccatgtgaaggcaatggaagaaaggaaattacttcatagtttcttggctaaatcacaggatggactgcctcctaggagaatgaaggacagttatattgaagttctcttgcctttgggcagtgagcctgaattacgagagaaatatttgactgttcaaaacaccgtaagatttggcaggattcttgaggatcttgacagcttgggagttcttatttgttacatgcacaacaaaatccactccgccaagatgtctcctttatcgatagttacagccctggtggataagattgatatgtgtaagaagagcttgagcccagaacaggacattaagttcagtggccatgttagctgggtcgggaagacatccatggaagtgaagatgcaaatgttccagttacatggtgatgaattttgtcctgttttggatgcaacatttgtaatggtggctcgtgattctgaaaataaagggccggcatttgtaaatccactcatccctgaaagcccagaggaagaggagctctttagacaaggggaattgaacaaggggagaagaattgccttcagctccacgtcgttactgaaaatggcccccagcgctgaggagaggaccaccatacatgagatgtttctcagcacactggatccaaagactataagttttcggagtcgagttttaccctctaatgcagtgtggatggagaattcaaaactgaagagtttggaaatttgccaccctcaggagcggaacattttcaatcggatctttggtggtttccttatgaggaaggcatatgaacttgcgtgggctactgcttgtagctttggtggttctcgaccgtttgtggtagcagtagatgacatcatgtttcagaaacctgttgaggttggctcattgctctttctttcttcacaggtatgctttactcagaataattatattcaagtcagagtacacagtgaagtggcctccctgcaggagaagcagcatacaaccaccaatgtctttcatttcacgttcatgtcggaaaaagaagtgccattggttttcccaaaaacatatggagagtccatgttgtacttagatgggcagcggcatttcaactccatgagtggcccagcgaccttgagaaaggactaccttgtggagccctaagaacaccacatttgttgaaaactagcactctacccacagtgacgtggtatctgatgaagacctgatcgagtgtattgattttagtattgcttcgtgtcctccacacaggaggaggatgtattcagcctttaggatgatcagaaaagcagaaagagagagtggccggatggggctgaggggagaaagaattattaaacaataaatactttcaagacaattttaattgtgaaccta

SEQ ID NO: 735 - DNA, 1901 bp, HOMO SAPIENS
ccttacccggcgtgccccgcgcccggaggcgctgacgtggccgccgtcagagccgccatcttgtgggagcaaaaccaacgcctggctcggagcagcagcctctgaggtgtccctggccagtgtccttccacctgtccacaagcatggggaacatcttcgccaacctcttcaagggcctttttggcaaaaaagaaatgcgcatcctcatggtgggcctggatgctgcagggaagaccacgatcctctacaagcttaagctgggtgagatcgtgaccaccattcccaccataggcttcaacgtggaaaccgtggagtacaagaacatcagcttcactgtgtgggacgtgggtggccaggacaagatccggcccctgtggcgccactacttccagaacacacaaggcctgatcttcgtggtggacagcaatgacagagagcgtgtgaacgaggcccgtgaggagctcatgaggatgctggccgaggacgagctccgggatgctgtcctcctggtgttcgccaacaagcaggacctccccaacgccatgaatgcggccgagatcacagacaagctggggctgcactcactacgccacaggaactggtacattcaggccacctgcgccaccagcggcgacgggctctatgaaggactggactggctgtccaatcagctccggaaccagaagtgaacgcgacccccctccctctcactcctcttgccctctgctttactctcatgtggcaaacgtgcggctcgtggtgtgagtgccagaagctgcctccgtggtttggtcaccgtgtgcatcgcaccgtgctgtaaatgtggcagacgcagcctgcggccaggctttttatttaatgtaaatagtttttgtttccaatgaggcagtttctggtactcctatgcaatattactcagctttttttattgtaaaaagaaaaatcaactcactgttcagtgctgagaggggatgtaggcccatgggcacctggcctccaggagtcgctgtgttgggagagccggccacgcccttggctttagagctgtgttgaaatccattttggtggttggtttttaacccaaactcagtgcattttttaaaatagttaagaatccaagtcgagaacacttgaacacacagaagggagaccccgcctagcatagatttgcagttacggcctggatgccagtcgccagcccagctgttcccctcgggaacatgaggtggtggtggcgcagcagactgcgatcaattctgcatggtcacagtagagatccccgcaactcgcttgtccttgggtcaccctgcattccatagccatgtgcttgtccctgtgctcccacggttcccaggggccaggctgggagcccacagccaccccactatgccgcaggccgccctacccaccttcaggcagcctatgggacgcagggccccatctgtccctcggtcgccgtgtggccagagtgggtccgtcgtccccaacactcgtgctcgctcagacactttggcaggatgtctggggcctcaccagcaggagcgcgtgcaagccgggcaggcggtccacctagacccacagcccctcgggagcaccccacctctgtgtgtgatgtagctttctctccctcagcctgcaagggtccgatttgccatcgaaaaagacaacctctacttttttcttttgtattttgataaacactgaagctggagctgttaaatttatcttggggaaacctcagaactggtctatttggtgtcgtggaacctcttactgctttcaatacacgattagtaatcaactgttttgtatacttgttttcagttttcatttcgacaaacaagcactgtaattatagctattagaataaaatctcttaactatttcaaaaaaaaaaaaaa

SEQ ID NO: 736 - DNA, 7819 bp, HOMO SAPIENS
gtgtaggagctgccagcgtgcccagcagctggtgttcccgtccgtacctccagaagagcccagcgcgtgcaccatccccaccccctagcttccctccccacctacggctttcacgcactcgcagtgattgttttgcccgctcccgccgccgccgccgccgccgccgccagaggagcagcagcgcttgtgcaaaccgggaagatggcggccggcggcggcggaggcagcagtaaggcctcctcctcgtcggcctcttcggcaggggctctggagtcctcgttggatcgaaaattccagtcggtaaccaacaccatggagtccattcaaggcttgtcgtcttggtgtatagagaacaaaaaacaccacagtactatcgtctatcattggatgaagtggctccggagatctgcatatccccaccgtttgaatctcttttaccttgccaatgatgtcatacagaactgtaaaaggaaaaatgcaatcatattccgtgaatcatttgctgatgtacttcctgaagcagctgctctagtgaaggatccatctgtctctaagtctgtagaacgaatctttaaaatctgggaagatagaaatgtatacccagaagaaatgattgtggcattgagagaagctttgagtaccactttcaaaactcagaagcagctgaaagaaaatctgaacaaacaaccgaataagcagtggaagaaatcacaaacatctacaaatccaaaagctgctctcaagtctaagatagttgctgaatttcgatctcaggccctaattgaagagctgttgctatacaagcgctcagaagatcagatagaactgaaggaaaagcagttgtcaactatgagggtggatgtgtgcagcacagaaactctcaaatgcttaaaagataaaacaggtgggaagaagttctccaaagaatttgaagaggcaagctccaagctggaagaatttgtgaatggattagataagcaggtgaaaaacggaccctcattaacagaagcactggaaaatgctggaattttctatgaagcacaatacaaagaagtaaaagtggtggctaatgcatataaaacctttgctaaccgagtaaacaatttaaagaagaagttggatcaattgaagtcaacccttccagatcctgaagaatcaccagttccttccccaagcatggacgctccctccccgactggttctgagtctccttttcagggaatgggaggtgaggaatcccagtcaccaaccatggagagtgagaaatctgccacacctgaacctgtgacagataatcgtgatgtggaagacatggaactctcagatgtggaagatgatgggtcaaaaatcattgtcgaggacaggaaggaaaaacctgcagagaagtcagctgtatccacttctgtacctacaaagccaacagaaaatatctcaaaggcctcttcatgtaccccagtgcctgtgaccatgacagcaactccacctcttccaaagcctgtgaatacttctctttccccttccccagcattggctttgccaaacctggctaatgtggatctggcaaagatcagttccatccttagcagtttaacatcagtcatgaaaaatactggggtcagtcctgcatcaagaccttctccaggaacgcccaccagccccagcaacctcaccagtggcctgaaaacacctgcacctgccacgacaacatctcacaaccctctggcaaatatcctctccaaggtggagatcaccccagagagcattctgtctgcactttccaaaacccagacacagtcagcccctgcactgcaaggcctgtcatctttacttcagagtgttactgggaacccagttccagccagtgaagctgcctcacagagcacttcagcctcccctgccaacaccacagtctctaccataaagggaagaaatctgccctccagtgcccaaccttttattcccaaaagcttcaactattctcctaactcatcaacttctgaagtctcttcaacttcagccagcaaggcctcaattgggcaaagcccagggctcccaagcactacttttaaactaccttccaactctttggggtttacagctacccacaatactagccctgctgccccacctactgaagttaccatctgccaatcttcagaggtctccaagccaaagctggagtcagagtccacctccccaagcctggaaatgaagattcacaacttcttaaaaggtaatcctggtttcagtggcttaaacttaaacatcccaatcctgagcagtttggggtccagcgccccatcagagagccatccctcagacttccagcgtggccctactagcacctcaatcgacaacattgatggaacccctgtacgggatgaacggagtgggacacccacccaggatgagatgatggacaagcccacatccagcagtgtagatactatgtccctgctttctaagatcattagccctggttcctcaacacccagcagtacaagatcaccaccccctgggagagatgaaagctacccccgagagctctccaattctgtatctacatatcgaccctttggtctgggcagtgaatctccctataagcagccttctgatggaatggagagaccatcttccctgatggactcttcacaggaaaagttctacccagatacttctttccaagaagatgaggattaccgagattttgagtattcagggcctccaccctctgccatgatgaacctagagaagaaaccagccaaatctatcctgaaatcaagcaagctgtctgataccaccgagtaccagccaattctgtccagttatagccacagagcccaagaatttggggtaaagtctgccttccctccatctgtaagggccctcctggactctagtgagaactgtgaccgtctctcatcttcccctgggctatttggtgccttcagcgtaagagggaatgaacctgggtctgaccggtcaccatcaccgagtaagaatgattcatttttcacccctgactccaaccacaatagcttgtctcaatctaccactgggcatctcagtttgccacagaagcagtacccagactctcctcacccagtcccacatcgttcccttttctctccgcagaacacccttgccgctcccacgggtcacccacccacgtcaggcgtggagaaagtcctggcctccaccatttccaccacgtcgacgattgaatttaagaatatgcttaaaaacgcctcacgtaagccctcagatgataagcattttggccaggctcccagcaagggcactccaagtgatggtgtcagtctctcaaacctcacccaacccagcttgaccgccactgatcagcagcaacaagaagagcactaccgcatagaaacccgcgtctcctcctcctgcttagacttgcctgatagcacagaagaaaagggggcccctatagaaaccttgggttatcacagtgcatccaataggaggatgtcaggggagccgatccagaccgtagagtccatccgagttcctgggaagggaaatagaggacatgggcgtgaggcttcaagggtgggttggtttgatctgagcacatcaggtagctcttttgacaatggcccttcaagtgcctctgagttggcatcccttgggggtgggggcagcggaggcctcactggctttaaaacagcaccatacaaggaacgggcacctcaatttcaggagagtgtcggcagctttcgttccaacagtttcaactcaacatttgagcatcatcttcccccatcccccttggaacatgggacacccttccagagagagccagtggggccatcatctgccccacctgtccctcctaaggatcatggtggtatcttctctcgagatgcacccactcatctaccctctgtggatctttcgaaccccttcacaaaggaggcagccctggcccatgctgccccaccccctcctcctggagagcacagtggaattcctttccctaccccacctcctcctccccctcctggggaacatagcagcagtggtgggagtggtgtccccttttctactccaccccctcctccaccccctgttgaccactctggagttgtacccttcccagccccaccactggcagagcacggagtggcaggggctgtggcagtatttcccaaggaccatagttccctccttcaagggaccctggctgagcattttggggtactcccaggacccagggaccacgggggccccacccaacgggacctcaacggccctggccttagccgtgtacgagagagcctcaccctaccctcccattctctggaacacctgggcccaccccatggaggaggaggtgggggaggcagcaacagcagcagtggcccccccttgggtccctcacacagagacaccatcagccggagtggtataatcttacggagtccccggccagactttcggcctagggaaccttttctcagcagagacccatttcacagtttaaagagacccaggccaccttttgctaggggccctccgttctttgcaccaaaacgcccattcttccctcccaggtactgatggaaaccaagggaaaggcattttgaacagtctagagaacattggaagtaggagtttggtttattgttgttgtttttatttgttttctctttctcgattttttttttattataacaaagggcctctcttccaaagtaagaaatcacatacgcttacgttttactattcaattcaatcctccctcccattgcacttatctaccttccccaagttgtttgtattaaaaaaaaaaaaaaaaaaaaaaagtaaagaaacacaaccaaagccatttcatttggctggggggttggggagtggggaggaaaacaatctttattttaccccatctattgaagagtattattacatttgaaataaaacttccatcagtacagataaccacatgtgcaatgttgggatgttattttgggcttggcttatcgagtagtcaatggaaggattcccgtcccctctctcggcagcttagtaactgctgtagccagctcggctcccttccctgtgtatctgtgtcctgctaacagccaagagatgttgcaagggaggaaatgtgagagaccttgaacctgtcaggtttatttgttttgtttttaaaggcatgttgaagtttagttctttacccttctcctaaaatctttttttaatcagcctcaaggttaaaataaggagtgactacagtatgtaaaataaggaaaggaagcattaatggtgtgatgtgacctgcctgtttttttgtaaacaagagaataggaaatgttttcaaggtagtttcacatgtcttgcaccaagctcatgcctcttgcttttcctttttgactttatctccctcagtttttcttctgctgtggccagaaagacagtcactacagttgactattgatacaaaggtgcaacagaaatattatccctgcatttttaaatataagaagtagacattaattttaccatggtgcctccctaatgtaagtgatatttattggtggttttcaacaaaggttaactattaaagaaagaaatatttgtctttatcttccttttccccttgcctcagtcgtgttattcacccctattcttgatattttaaaggaggagattcagtagcattttcctttatattatacacatgtgtctatcccatttcaaggctcaagtcttacccccacctctcgctcccaataggaaataaagaccatttctgcccttagttgttttacatgcaagataagtgctttccttctccctggactgaaagacttgtttgtatttctacatctagtacttgggaaatagacaatcactgtactttgagtgtttatatctttatatctagggacactgaaaagtaaatgttgctttactacaatttttttttaatttagtgtcttaccccaaggcatactcaactgataatctccagctagatgagtaaaacagtatgtgtttagttttccagagaattctggcaagtttcatattttcttccaagttagtatagaactaactataggaagtatggggttgctttttcctccagtagaatattaaagatgggggagggtgggcaatgtagtgacagaaaatgattctctcagaatgaacttttcagagaaagagcagcataaaccaggtgcacatcatgatttgggagtttttgcgtaatttattctgttatttatttgggctcgccatgtgttctggggttaggatgctgcaggtcattcatcttcttaatgcctgtctggtcttaagccaactgttctttctttcctcgaccctctctgccctgtagctctccccacaaaaatgcatgataccatgaccttacgtgtgggatggggtatgtagtgtagcaaagaaaagaaagtatagttatattgagtcctaagacatttgttagggaaaagcataagagaaaatggggtgggaggtggggaaatgatatttgactttcaaaattgaaataggttttttttttgcagaaattaaatgggatgtttttcattctagaataaaagaatgtgaattctctttgctgctcttgtttaagctaaaagtagtgtttacttgataaggctctctgaccatttaatttttatcagaaaatgtggggatgtcaggaaagtggcttcctgaacgttggggcgggataattgtcctcaaaagtatgatggttaatacatgaaaggaagactttgttggacagtttcgaaggtgggcttttaaggagttgggtttttgtggggtacttttttgttttttaagccacaaaatcctcaatatgtttgttttaggatggaagtgaggatttgtatgagactgtcagctattaattttaaggaaatcttaaaatttacatttacatcagtaaatgaagatgacagtgtgtatatatgtgataaatagtgaaacagaaaagacagttctggtattcataacgtgaaagaaaggggttttattctttctgtgtctgtgatttaaaactccgtgaccatgctctgacttttgtatttcaacctgagtttaaacaaataaacaagatattttttaaagaaagcataacatagtgtgtcttagcaaggacatgattcatatggaagcagaatgtgagaagttgtaaggtccttggtactcactgtaaaatcacagacagagaattggtaggggttgtgaatacactagtaccacttaaagttcagtgatacagttcagaaatagggtccttaagtattttgaaagagtttactcttcagtcagcttagatgagagctctctccctgctcccctctaccctctcaaaagttgagagtaaatagaatttggtttgattccagggaggggaaaataagcagagaataggacttttatactttccaataccaggaataaaatgtttgtgatatatatgggtccagcaaacctatcgagataatgtgaatacgataaacttcctaatggcaggatattcactctcaatcctgaagttaccggttcctgcagaattgagcttcagctgttactgttttgaagccgctgtaaattactgctttccccagttcccccactattttttttaagtgggcgggggcgcctgttaagatctaaaatagatatgttggattgatattctcacgtgttcggtgtggaaaacaaaacaagtacatgctttagaagcaacaacaatgaaatccttttgaaatgtgtgttaatatcgtttaataaaataactagtttgaaa

SEQ ID NO: 737 - DNA, 3344 bp, HOMO SAPIENS
tgcgcggcggcggcgcgcgggcgcctggggcgggacttccggcgcgctggagcgttttccggccgtgcgtttgtggccgtccggcctccctgacatgcagccctctggaccccgaggttggaccctactgtgacacacctaccatgcggacactcttcaacctcctctggcttgccctggcctgcagccctgttcacactaccctgtcaaagtcagatgccaaaaaagccgcctcaaagacgctgctggagaagagtcagttttcagataagccggtgcaagaccggggtttggtggtgacggacctcaaagctgagagtgtggttcttgagcatcgcagctactgctcggcaaaggcccgggacagacactttgctggggatgtactgggctatgtcactccatggaacagccatggctacgatgtcaccaaggtctttgggagcaagttcacacagatctcacccgtctggctgcagctgaagagacgtggccgtgagatgtttgaggtcacgggcctccacgacgtggaccaagggtggatgcgagctgtcaggaagcatgccaagggcctgcacatagtgcctcggctcctgtttgaggactggacttacgatgatttccggaacgtcttagacagtgaggatgagatagaggagctgagcaagaccgtggtccaggtggcaaagaaccagcatttcgatggcttcgtggtggaggtctggaaccagctgctaagccagaagcgcgtgggcctcatccacatgctcacccacttggccgaggctctgcaccaggcccggctgctggccctcctggtcatcccgcctgccatcacccccgggaccgaccagctgggcatgttcacgcacaaggagtttgagcagctggcccccgtgctggatggtttcagcctcatgacctacgactactctacagcgcatcagcctggccctaatgcacccctgtcctgggttcgagcctgcgtccaggtcctggacccgaagtccaagtggcgaagcaaaatcctcctggggctcaacttctatggtatggactacgcgacctccaaggatgcccgtgagcctgttgtcggggccaggtacatccagacactgaaggaccacaggccccggatggtgtgggacagccaggcctcagagcacttcttcgagtacaagaagagccgcagtgggaggcacgtcgtcttctacccaaccctgaagtccctgcaggtgcggctggagctggcccgggagctgggcgttggggtctctatctgggagctgggccagggcctggactacttctacgacctgctctaggtgggcattgcggcctccgcggtggacgtgttcttttctaagccatggagtgagtgagcaggtgtgaaatacaggcctccactccgtttgctgtgacgggtctgctgcagtcctcagtcgggggtcctgggcaccatgtgactccccatcctcccatgaggggtccctgccctggatgagtcctagctgggggacaccctgagagctcgagcccctcccacccgggcatccgctggctgcctcctgtcagctgggcaggcggggcccacagtacctgccccaccaggacagcctggctcaggcctttctgggctgcttctcacatcctgggctggatgtgggtttggaagctctggaaccatcccggactcgcccactcctggattcgagggccctcgcagggacagctctgcccagcatcaccccagggcctggcagtgatagagctgagagctccacccccacatacctgccacccacctggccagccacagcacgtgtgtcacctgcagagagccacccagacgtccccaccgagtccagcacggcaagggtgcaggggctgccctagaaatgggctcagaggagcctggcccaccctcttgaaactggtcctggaccttggctcagctctgccgcctcaggtagcacgacccccaggccagcctggacacatcagggagcatggtgaggggcaacggcaggacccgtgggccatatcgggacaggcatttccagcgaggggtggggcagaggacatgtggctggcaggctacacccaccctgccatgcagcggtgtccaggctctggggaggccctggggaatttggaggcatcatgagccaaggcctggtggccctcgttcccctgcccctcgtcaccatcctgtccttggctggccgtgaggactcccctcctcaccactgggtcccacagggctgaggtgggcagtagagggcataggtgggtacatgtcccgggcaaggtctctcggggggacagaagtgagtccagggagtgggtgggcctgggcgtccctcactcagaatgccgtggggtgaggacggtgaggacagggtgggcactgggttctggtttagagtcagtaatgttagggcgcagtgggcagggggtcaggacatctccagccggtggtgaggaagcatggtggggtctcctccacaggacgggagctggggagggggtcctgggtcggacccaaggcacccacacttgagaaagcctccgcctggacgtcagggaggcctgcgagctgccacagtgcaggtgcagccgttcccaccgccctgctgctgcttgacacgggcataggagatacaagtggtgtgtgcggcggttcatgcctgtaatcccagtactttggaaagccgtggcgggaggaacgctgggcaacatggtgaaaccccgtctctaccccctaaaaatagaaaaattagcaagacatggtggcatgtgcctgtactcctggctactcaggaggctgagatgggaggatcgcttgatgaggttgaggctgcagtgagctgtgaccgactgcactccaaaaaccttgtctaaaaaaacacaagctgccactggctttggggcactgaccttgtctccccagaggtgctgacgctaacattcaagttgttctcgggggtcctgtggcttctgttggagtgagggtgggggacacgcaggtctgggagggtggtgtgggcctggagctaggcattgccagatcagcattgggtggaggcaggggtggggatgccacacaggatgggatgtctagagcgggctgtgtctcccggggggatgggcagagggtggggcaggaattagctggaaatgagattgtggggtgcagtttggggatcagatgccccaacctgaactgaccgtcatccctgtggccagggtccccacacaaccctcacccctggctgtgagaatcctgaggcaccttgatgcattttttttcatgccctgtgaaaaaaaaaaaaaaaaaaaaa

SEQ ID NO: 738 - DNA, 1734 bp, HOMO SAPIENS
cccgcccacgccgcgcccggagccgcgcggcccgaagcacccggcccggatcgcagagcccgcgccctgcgccggcggcaatgaagatctggagctcggagcacgtgtttggccacccgtgggacacggtcatccaggcggccatgcgcaagtacccgaacccgatgaacccgagcgtgctgggcgtggatgtgctacagcgccgcgtggacggccgcggccgcctgcacagcttgcgcctgctcagcaccgagtgggggctgcccagcctcgtgagagcgattttgggaaccagtaggacattgacatacatccgagaacattctgtggtggatccagtggaaaagaaaatggaactttgttctaccaatatcacactcacaaatttggtgtcagttaatgagaggttggtgtacacacctcatccagagaacccagaaatgaccgtgctcacacaagaagccatcatcactgtgaaggggattagccttggtagttatttggaaagtttaatggccaatacgatatcatccaatgcaaagaaggggtgggctgctatcgagtggataattgaacactctgaaagcgctgtgagctaaggaggcctgtgcctgtgcttgtcataaatggtgatgcttcccagaagaaaggaaagaaggaggtgaggagaggacgagcaaggacgggacggaaaagcacgtctggctgcgagggcacacagggccggggaggaggattaggctggactgatcgcgggtcgcaggtgaccccgggaccagatgtccctcccctcatgagcgtgcaacagggagcagccccagccagccccaccgccgccgtctgcgtggatggagggctcgaggccctcgcccgtgtcccttaggggcggcgcccatcgtcctgcctgccgcagtggcccagccccttctctccctgcaggtgacccgcgccgcccccgcccgcccgcccacgctgtcctccacttaggctcctccacaaacgctggcgggtgtgccgccctccagcctctccgcccccgtcccctcggtcctgcagatcaccaagcagctctcctgggcccgcggctgctccgggcctcacatctgctgctggcctcggtgggctctgactgcggggctcacggggcctggggccatggctttcttctcggcccccaaatgcctttcctggagtggctaagcctctcctgacgaggctcctcatgcggggagagggctggggtccaggggtttcccggccctttctgcaggctgtgccagccccctccagtctgccactgccgtgcccgggggacatcctgcgcccaggctggaggccctgcctcgctgcttgccagcctcacctgctggggctggaggccatggatccctcatagtatccaaggtttgagttcctgtttttcgccttatagttttgtgagtgtttgagggacaacgaccaaaggtcttttccccaccatctttaaatcaaagttgtttaaaacaacattaattttaaaaaatacataaaagcaacccatgcttatggttaaaaaagagtacaggagtctggagtccgttgaagggtaaaggcctcccgcaagctgccagtcggctctttttcgcaaagccttccagaagttttctgtgcttatgaaagcgtatgtgtggcctttctcttcccttcttttattaaacacagataggtttatgctggataaaaaaaaaaaaaaaa

SEQ ID NO: 739 - DNA, 4369 bp, HOMO SAPIENS
ttccagcgcagctcagcccctgcccggcccggcccgcccggctccgcgccgcagtctccctccctcccgctccgtccccgctcgggctcccaccatccccgcccgcgaggagagcactcggcccggcggcgcgagcagagccactccagggagggggggagaccgcgagcggccggctcagcccccgccacccggggcgggaccccgaggccccggagggaccccaactccagccacgtcttgctgcgcgcccgcccggcgcggccactgccagcacgctccgggcccgccgcccgcgcgcgcggcacagacgcggggccacacttggcgccgccgcccggtgccccgcacgctcgcatgggcccgcgctgagggccccgacgaggagtcccgcgcggagtatcggcgtccacccgcccagggagagtcagacctgggggggcgagggccccccaaactcagttcggatcctacccgagtgaggcggcgccatggagctccgggtgctgctctgctgggcttcgttggccgcagctttggaagagaccctgctgaacacaaaattggaaactgctgatctgaagtgggtgacattccctcaggtggacgggcagtgggaggaactgagcggcctggatgaggaacagcacagcgtgcgcacctacgaagtgtgtgacgtgcagcgtgccccgggccaggcccactggcttcgcacaggttgggtcccacggcggggcgccgtccacgtgtacgccacgctgcgcttcaccatgctcgagtgcctgtccctgcctcgggctgggcgctcctgcaaggagaccttcaccgtcttctactatgagagcgatgcggacacggccacggccctcacgccagcctggatggagaacccctacatcaaggtggacacggtggccgcggagcatctcacccggaagcgccctggggccgaggccaccgggaaggtgaatgtcaagacgctgcgtctgggaccgctcagcaaggctggcttctacctggccttccaggaccagggtgcctgcatggccctgctatccctgcacctcttctacaaaaagtgcgcccagctgactgtgaacctgactcgattcccggagactgtgcctcgggagctggttgtgcccgtggccggtagctgcgtggtggatgccgtccccgcccctggccccagccccagcctctactgccgtgaggatggccagtgggccgaacagccggtcacgggctgcagctgtgctccggggttcgaggcagctgaggggaacaccaagtgccgagcctgtgcccagggcaccttcaagcccctgtcaggagaagggtcctgccagccatgcccagccaatagccactctaacaccattggatcagccgtctgccagtgccgcgtcgggtacttccgggcacgcacagacccccggggtgcaccctgcaccacccctccttcggctccgcggagcgtggtttcccgcctgaacggctcctccctgcacctggaatggagtgcccccctggagtctggtggccgagaggacctcacctacgccctccgctgccgggagtgccgacccggaggctcctgtgcgccctgcgggggagacctgacttttgaccccggcccccgggacctggtggagccctgggtggtggttcgagggctacgtcctgacttcacctatacctttgaggtcactgcattgaacggggtatcctccttagccacggggcccgtcccatttgagcctgtcaatgtcaccactgaccgagaggtacctcctgcagtgtctgacatccgggtgacgcggtcctcacccagcagcttgagcctggcctgggctgttccccgggcacccagtggggctgtgctggactacgaggtcaaataccatgagaagggcgccgagggtcccagcagcgtgcggttcctgaagacgtcagaaaaccgggcagagctgcgggggctgaagcggggagccagctacctggtgcaggtacgggcgcgctctgaggccggctacgggcccttcggccaggaacatcacagccagacccaactggatgagagcgagggctggcgggagcagctggccctgattgcgggcacggcagtcgtgggtgtggtcctggtcctggtggtcattgtggtcgcagttctctgcctcaggaagcagagcaatgggagagaagcagaatattcggacaaacacggacagtatctcatcggacatggtactaaggtctacatcgaccccttcacttatgaagaccctaatgaggctgtgagggaatttgcaaaagagatcgatgtctcctacgtcaagattgaagaggtgattggtgcaggtgagtttggcgaggtgtgccgggggcggctcaaggccccagggaagaaggagagctgtgtggcaatcaagaccctgaagggtggctacacggagcggcagcggcgtgagtttctgagcgaggcctccatcatgggccagttcgagcaccccaatatcatccgcctggagggcgtggtcaccaacagcatgcccgtcatgattctcacagagttcatggagaacggcgccctggactccttcctgcggctaaacgacggacagttcacagtcatccagctcgtgggcatgctgcggggcatcgcctcgggcatgcggtaccttgccgagatgagctacgtccaccgagacctggctgctcgcaacatcctagtcaacagcaacctcgtctgcaaagtgtctgactttggcctttcccgattcctggaggagaactcttccgatcccacctacacgagctccctgggaggaaagattcccatccgatggactgccccggaggccattgccttccggaagttcacttccgccagtgatgcctggagttacgggattgtgatgtgggaggtgatgtcatttggggagaggccgtactgggacatgagcaatcaggacgtgatcaatgccattgaacaggactaccggctgcccccgcccccagactgtcccacctccctccaccagctcatgctggactgttggcagaaagaccggaatgcccggccccgcttcccccaggtggtcagcgccctggacaagatgatccggaaccccgccagcctcaaaatcgtggcccgggagaatggcggggcctcacaccctctcctggaccagcggcagcctcactactcagcttttggctctgtgggcgagtggcttcgggccatcaaaatgggaagatacgaagaaagtttcgcagccgctggctttggctccttcgagctggtcagccagatctctgctgaggacctgctccgaatcggagtcactctggcgggacaccagaagaaaatcttggccagtgtccagcacatgaagtcccaggccaagccgggaaccccgggtgggacaggaggaccggccccgcagtactgacctgcaggaactccccaccccagggacaccgcctccccattttccggggcagagtggggactcacagaggcccccagccctgtgccccgctggattgcactttgagcccgtggggtgaggagttggcaatttggagagacaggatttgggggttctgccataataggaggggaaaatcaccccccagccacctcggggaactccagaccaagggtgagggcgcctttccctcaggactgggtgtgaccagaggaaaaggaagtgcccaacatctcccagcctccccaggtgcccccctcaccttgatgggtgcgttcccgcagaccaaagagagtgtgactcccttgccagctccagagtgggggggctgtcccagggggcaagaaggggtgtcagggcccagtgacaaaatcattggggtttgtagtcccaacttgctgctgtcaccaccaaactcaatcatttttttcccttgtaaatgcccctcccccagctgctgccttcatattgaaggtttttgagttttgtttttggtcttaatttttctccccgttccctttttgtttcttcgttttgtttttctaccgtccttgtcataactttgtgttggagggaacctgtttcactatggcctcctttgcccaagttgaaacaggggcccatcatcatgtctgtttccagaacagtgccttggtcatcccacatccccggaccccgcctgggacccccaagctgtgtcctatgaaggggtgtggggtgaggtagtgaaaagggcggtagttggtggtggaacccagaaacggacgccggtgcttggaggggttcttaaattatatttaaaaaagtaactttttgtataaataaaagaaaatgggacgtgtcccagctccaggggtaaaaaaaaaaaaaaaaaa

SEQ ID NO: 740 - DNA, 1701 bp, HOMO SAPIENS
cggactcaagaagttctcaggactcagaggctgggatcatggtagatggaaccctccttttactcctctcggaggccctggcccttacccagacctgggcgggctcccactccttgaagtatttccacacttccgtgtcccggcccggccgcggggagccccgcttcatctctgtgggctacgtggacgacacccagttcgtgcgcttcgacaacgacgccgcgagtccgaggatggtgccgcgggcgccgtggatggagcaggaggggtcagagtattgggaccgggagacacggagcgccagggacaccgcacagattttccgagtgaacctgcggacgctgcgcggctactacaatcagagcgaggccgggtctcacaccctgcagtggatgcatggctgcgagctggggcccgacgggcgcttcctccgcgggtatgaacagttcgcctacgacggcaaggattatctcaccctgaatgaggacctgcgctcctggaccgcggtggacacggcggctcagatctccgagcaaaagtcaaatgatgcctctgaggcggagcaccagagagcctacctggaagacacatgcgtggagtggctccacaaatacctggagaaggggaaggagacgctgcttcacctggagcccccaaagacacacgtgactcaccaccccatctctgaccatgaggccaccctgaggtgctgggccctgggcttctaccctgcggagatcacactgacctggcagcaggatggggagggccatacccaggacacggagctcgtggagaccaggcctgcaggggatggaaccttccagaagtgggcagctgtggtggtgccttctggagaggagcagagatacacgtgccatgtgcagcatgaggggctacccgagcccgtcaccctgagatggaagccggcttcccagcccaccatccccatcgtgggcatcattgctggcctggttctccttggatctgtggtctctggagctgtggttgctgctgtgatatggaggaagaagagctcaggtggaaaaggagggagctactctaaggctgagtggagcgacagtgcccaggggtctgagtctcacagcttgtaaagcctgagacagctgccttgtgtgcgactgagatgcacagctgccttgtgtgcgactgagatgcaggatttcctcacgcctcccctatgtgtcttaggggactctggcttctctttttgcaagggcctctgaatctgtctgtgtccctgttagcacaatgtgaggaggtagagaaacagtccacctctgtgtctaccatgacccccttcctcacactgacctgtgttccttccctgttctcttttctattaaaaataagaacctgggcagagtgcggcagctcatgcctgtaatcccagcacttagggaggccgaggagggcagatcacgaggtcaggagatcgaaaccatcctggctaacacggtgaaaccccgtctctactaaaaaatacaaaaaattagctgggcgcagaggcacgggcctgtagtcccagctactcaggaggcggaggcaggagaatggcgtcaacccgggaggcggaggttgcagtgagccaggattgtgcgactgcactccagcctgggtgacagggtgaaacgccatctcaaaaaataaaaattgaaaaataaaaaaaaaaaaaaaaaa

SEQ ID NO: 741 - DNA, 9390 bp, HOMO SAPIENS
gaggcggtggcggcggaggcggcaccgattgctgtgtcggccccagtgcggccgaagtcgcggtagagcgtagccccacgcccctcccccgtccgcgccctccctctttccctggggatggagaaggcgacggttccggtggcggcggcgacggctgcagaaggagaagggagccccccggcggtggcggctgtggcgggcccccccgcggcggcggaggtcggcggcggcgttggcggcagcagcagagctcgctcggcctcgtctcctcgtgggatggtgcgagtctgcgacctgctcctgaagaagaagccgccgcagcagcagcaccacaaggccaagcgtaaccggacttgccgaccccccagcagcagcgaaagcagcagcgacagcgacaacagcggcggcggtggaggcggcggtggaggcggaggtggcggcggcggcaccagcagtaacaacagcgaggaagaagaggacgacgacgacgaggaagaggaggtttctgaggtggagtctttcattttggatcaggatgatttggaaaatccaatgctggaaacagcttccaagttgctcttatcaggtactgctgatggtgcagacctcaggacagtagatccagaaacacaggctagactggaagctttactagaagctgcaggaataggaaaattgtccacggctgatggtaaagcctttgcagatcctgaagtacttcggaggttgacatcgtctgttagttgtgcgttggatgaagctgctgctgcacttacccgtatgagagctgaaagcacagcaaatgcagggcagtcggacaaccgcagtttggcagaagcctgttcagaaggagatgtaaatgctgtgcgaaagttactcattgaagggcgaagtgtaaatgaacacacagaggaaggggagagcctcctttgtttagcttgttctgctggatactatgagcttgcacaggttttgttggcaatgcatgcaaatgtggaagataggggaatcaaaggtgacattacacctttaatggctgctgctaatggaggacatgtcaaaattgtgaagttgctgctagctcataaagcagatgttaatgcacagtcttcaacaggcaatacagcacttacatatgcttgtgctggaggctatgtagatgttgtaaaggtgctcttggaatccggtgctagtattgaggaccataatgaaaatggtcatacccctcttatggaagctggaagtgctggacatgtggaagtagccagattgctgctagaaaatggggctggcattaatacgcattctaatgaatttaaagagagtgcccttaccttagcttgttacaaaggacacttagagatggtgcgatttcttttggaagcaggcgcggatcaagagcataaaacagatgaaatgcacactgctctgatggaggcttgcatggatggccatgttgaagtagctaggttacttcttgacagcggtgcccaagtgaacatgcctgctgattcatttgagtcaccattaactttggctgcatgtggtgggcatgtggaacttgcggctttacttattgaaagaggagctagcctggaagaggtcaatgatgaaggttatacaccattgatggaagcagctcgagaaggacatgaagaaatggtggcattacttcttggtcaaggagcaaatatcaatgcacagacagaagaaactcaagaaactgccttgactctggcttgctgtggaggctttctggaagtggcagactttctaattaaggcaggagccgatatagaactagggtgttctacccctttaatggaagctgctcaagagggtcatttggagttagttaaatacttattagctgcaggagctaacgttcatgcaacaacagcaacaggggatacagcactaacatatgcctgtgaaaatggtcatactgatgtagcagatgtcttacttcaggcaggcgcagatctggaacatgaatctgaaggtggaagaactcctttaatgaaagctgcaagagctggtcatgtttgtactgttcagttcttaattagtaaaggagcgaatgtgaatagaaccacagctaataatgaccatactgtactgtccctggcttgtgcagggggtcatctggcagtggtggaactacttttggctcatggggcagatcctactcaccgtttgaaagatggctcaactatgttgatagaagcagcaaaaggtggccatacaagtgttgtttgctatctcttggattatcctaataacttgctttcagcccctccaccagatgtcactcagttaactcccccatcccacgatttaaatagggctcctcgtgtaccagttcaagcactgcccatggttgttccacctcaggagcctgacaaaccacctgccaatgttgccaccactcttcccatcaggaataaagctgcttctaaacaaaagtccagcagccatttgccagcaaacagccaggatgtacagggttacatcaccaatcagtctccagagagcattgtagaagaggctcagggaaagttaacagaactggaacagaggataaaagaagccatagaaaagaatgcacagctgcagtccttggaactggctcatgctgaccaacttaccaaggagaagatcgaggagctcaacaaaacaagggaggaacaaattcagaagaaacaaaagattttggaggaactacagaaagtagaacgagagttacaactgaaaactcagcagcagctaaaaaagcagtatctagaggttaaagctcaaagaattcaacttcagcaacagcagcaacagtcttgccaacacctgggattactaactcctgttggagttggagagcagctttctgagggagactatgcacggttacagcaagtggatcctgttttacttaaagatgaaccccagcagactgctgctcagatgggttttgcgccaatccagcctctggcgatgcctcaagctttgcctctggcggcaggtcccttgcctccagggtccatcgcaaatcttacagaactgcaaggagtgatagttggacagccagtactgggccaagcacagttggcagggctggggcaaggaattctgacagaaacacaacaagggttaatggtagccagccctgctcagaccctcaatgacacgctggatgacatcatggcagcagtcagtggaagagcatctgcaatgtcaaacactcctacccacagtattgctgcatccatttcccaacctcagactccaactccaagtcctatcatctctccttcagccatgcttcctatctaccctgccattgatattgatgcacagactgagagtaatcatgacacggcgctaacacttgcctgtgctggtggccacgaggaactggtacaaacactgctagagagaggagctagtatagagcaccgagacaagaaaggttttactccactcatcttggctgccacagctggtcatgttggtgttgtggaaatattgctggacaatggtgcagacattgaagcccagtctgaaagaaccaaggacacaccactctccttggcttgttctgggggaagacaggaggtggtggagctattgttagctcgaggggcaaataaagagcacaggaatgtttctgattacacacctctaagtctggctgcttctggtggctatgtgaacatcatcaaaatattactaaatgcaggagctgagattaactctagaactggtagcaaattgggcatctctcctctgatgttagcagctatgaatgggcatacagctgctgttaagctcctgttagacatgggctctgacataaatgctcagatagaaaccaatcggaacactgcccttactttagcctgcttccaaggaagaactgaagtggttagtcttctgcttgatagaaaagcaaatgttgaacacagagctaagactggtctcacaccactaatggaagctgcctctggtggatatgcggaggtgggccgagttcttttggataaaggtgctgatgttaatgcccctccagttccctcctcaagagatacagctttaaccatagcagcagataaagggcattacaaattctgtgagcttcttattggcaggggagctcatattgatgtacgtaacaagaaggggaacactccattgtggctagcagcaaatggtggacacctcgatgtggttcagttactggtgcaagcaggtgcagatgtggatgcagcagataaccgcaagataactcctcttatggcagcatttagaaagggtcatgtgaaggtggtgcgctacttagtcaaagaagtcaatcagtttccatcagattctgaatgtatgagatacatagcaaccatcactgataaggagatgctgaagaagtgtcatctttgtatggagtcaatagtacaagccaaagatagacaggctgctgaagcaaacaaaaacgccagcattttgttagaggagttagacttggaaaagttaagggaagaaagtcggaggctggctttggctgcgaaaagagaaaaaagaaaagagaagagaaggaagaaaaaggaagaacaaagaaggaaactagaagaaattgaagccaaaaataaagagaactttgaactccaagctgctcaagaaaaagaaaagcttaaagttgaagatgagcctgaagtcttgacagaacctccaagtgccacaaccactactaccataggtatatctgcaacctggacaactttggcaggttctcatggtaaaagaaataataccataactacaaccagttcaaagaggaaaaacaggaaaaataaaattactccagaaaacgttcaaattatatttgatgatccactaccaatttcatacagtcagccagagaaggtgaatggagagtccaagagcagcagtaccagcgagagtggggacagtgataacatgaggatttccagctgcagcgatgaaagtagtaacagcaacagcagtcgtaagagtgacaatcattcaccagctgtggtcactaccactgtgagcagcaaaaagcagccatcagttcttgttacatttccaaaggaagagagaaaatctgtttctggcaaggcttcaataaaattgtcagaaactatcagtgaagggaccagtaattctctatctacttgtacaaaatctggtccatctcccctttcttctccaaatgggaagttaacagtagcaagtcctaagcgtgggcaaaagagggaagaaggatggaaagaagttgtaagaaggtcaaagaaagtatctgttccatcaactgtgatatccagagtgattggaagaggaggctgtaatatcaatgctattcgggagtttactggtgcacacatagatattgataaacagaaagacaagactggagaccggataatcactataaggggtggcactgaatcaacaagacaagcaactcaattgattaatgctttgatcaaggatccagacaaagaaattgatgaacttattccaaagaatcgtttgaaaagctcctcagcaaattccaaaatagggtcatcagcacctaccaccactgctgctaacacttccttaatgggaattaaaatgacaactgtagctctgtcatcaacatctcaaactgccacagcactcactgtgcctgcaatttcttctgcatccactcacaaaaccattaagaacccagtgaataatgtgaggcctggttttccagtttctcttccattagcatatcctcctccacagtttgcacatgctttgcttgctgctcagactttccagcagatccgtccaccaaggttgcccatgacccactttggaggtacttttccaccagctcaatccacttggggtccgtttcctgtcaggcctttgagccctgccagagctactaactcgcctaagcctcacatggtgcctcgccatagcaatcagaatagcagtggttctcaggtgaattcagcaggttctttaacttcaagcccaacaactacaaccagttcatcagcttcaacggtgcctggtacatctacaaatggcagtccaagttcaccttctgtccgaaggcagctttttgtcacagttgtgaagacatccaatgccaccacaacaacagtcacaaccacggcaagcaacaacaacactgcacccacaaatgccacatatcctatgcctactgccaaagaacactatccagtatcatccccatcttccccatcaccaccagcccagccaggaggggtttctagaaacagccctttggattgtggatcagcatctccaaataaagtggcatcttcctccgaacaggaagcaggtagtccaccagtagtagaaacaacaaacactagacctccaaacagcagcagttcttctgggagttcatcagctcattctaatcagcaacaacctccgggatctgtttctcaggaaccaagaccacctcttcagcagtctcaggttcctcccccggaagttagaatgactgttcctcctttagcaacaagttctgctccagtggcggtgccttctactgccccagtgacttaccctatgcctcagacaccaatgggatgcccccagcctactcctaaaatggaaacccctgctattagaccaccccctcatggcacaactgcccctcacaagaattcagcttcagtgcaaaattcatctgttgcagtcctcagtgtcaatcacattaaaagacctcacagtgttccctcttctgtccagctaccttcgaccttaagtacacaaagtgcttgtcagaattcagtacatccagcaaataagcctattgctcccaatttcagtgcccccttaccatttgggccctttagcacattgtttgaaaacagccctacttctgctcatgccttctggggaggatctgttgtttcatctcagtcaacaccagaatctatgctatcaggaaaatcctcatatttgccaaattcagatcctttacatcagtctgatacttccaaagctccaggttttagaccaccattacagagacctgctccaagtccctcaggtattgtcaatatggactcgccatatggttctgtaacaccttcttcaacacatttgggaaactttgcttcaaacatttcaggaggtcagatgtacggacctggggcaccccttggaggagcacccgcagctgctaactttaacagacaacatttttccccgcttagtttgttgactccgtgttcatcagcatcaaatgattcttctgcacagtcagtatcctcgggagttcgtgcaccatctcctgccccatcatcagtaccgttagggtcagaaaagcccagcaatgtgtctcaggacaggaaagttccagtccctattgggactgaacgttctgcacgtatcaggcaaactggaacgtcagctccatctgttattgggagcaatttgtctacatcagtaggacatagtggcatctggtcctttgaagggattggtggcaatcaagacaaagtagactggtgtaaccctgggatgggaaatcctatgatccacagaccgatgtctgacccaggagtattttcacaacatcaagcaatggagcgagatagtacaggaattgtaactccttctggtacattccatcagcatgttcctgcaggctacatggactttcctaaagttgggggtatgcctttttctgtgtatgggaatgcaatgattcctccagtagcacctatccctgatggtgctggaggacccatatttaatggccctcatgctgcagacccttcttggaactcactgataaagatggtttccagctccacggaaaataatggccctcaaacggtgtggactggaccctgggcacctcacatgaacagtgtgcatatgaaccagcttggctgatgaggatcagcttgttagcctgcagattccttttcatttggaggaaatcacaagtggccgaaaaaaaaaattatgctcccaaatcattctactgatgtgcttgactgaagtgtgtaggctttttgcagaagatcttactaactgacctattttctgtgaacatttgtgactgcccattccccatcatcatccgttttaccttagttagcatttttcttatcatttttctttttttctttccctcttcccctttggacataactttctgttgaagctgttctttggctggttggttttagtactgtaaactgcttctgagcaaacacggaaatttagcaaaattatgtaaacttgatcctgaagttttagaatggcaaataaatgtacaattgtttacataacagaaaaggctaagcagaaagtaaatttcaatatgtcagtatagaggctctactttatgtagacttaaattaatgtgagatatgtaccttcatattcagaaatctggatgtttccttcatacattaaactattaataagcataacttttctactggtgtaatttaagtataaagtaaaataatgggcattatcattggatgtttccccacattggcttttaaaatacccatcttgctttctttttggtttatttgtagcaaggcacatatagaagaagaaatttctggcttttccatgttgttttattaccttttctcacttttaaaactaatacagacttatctcctcactcctttttctctccttacctttaccactaataccagtaaaattatctttctgatagtgaaaaggttctgtcaagattttcactgtaatggctgctacagagatggaccatcttcatcatcaccagtggtttcttctaattataaaatgtttaaactttctgagaatttaaaaagccaccactgttcccagtcagcatatacaagctcttaatattctgtttattaaataattcaatgtactattttatattggatgatattgattcttaacattggcttttcagtcatcaacagtcaacataaaaatttcaattttcagtaatttagtggaaaatatcttatttcttttttcaattttaaaggcttcctgcttttttacccttgtatattatcagtgaaaaggatcaacagttaatttgagccaagtaataaaagaaattctgcatttgtcacgaagacaatttatggtagacagataaatacacagattacagtgtaaagtctccatttaacctgtttataaaagatacaaggccacactaaactactcagtgggatttatatattccatccacttgaaacaataaacagtaatgtatccaagaagattatgtgtcctaccctgtctcatggaaaaattaattatatggttgaaatgtaaaagaaagtaagcataaaaatcgagtaatgtataaaaaaaaaaaaaaaa

SEQ ID NO: 742 - DNA, 987 bp, HOMO SAPIENS
aatataagtggaggcgtcgcgctggcgggcattcctgaagctgacagcattcgggccgagatgtctcgctccgtggccttagctgtgctcgcgctactctctctttctggcctggaggctatccagcgtactccaaagattcaggtttactcacgtcatccagcagagaatggaaagtcaaatttcctgaattgctatgtgtctgggtttcatccatccgacattgaagttgacttactgaagaatggagagagaattgaaaaagtggagcattcagacttgtctttcagcaaggactggtctttctatctcttgtactacactgaattcacccccactgaaaaagatgagtatgcctgccgtgtgaaccatgtgactttgtcacagcccaagatagttaagtgggatcgagacatgtaagcagcatcatggaggtttgaagatgccgcatttggattggatgaattccaaattctgcttgcttgctttttaatattgatatgcttatacacttacactttatgcacaaaatgtagggttataataatgttaacatggacatgatcttctttataattctactttgagtgctgtctccatgtttgatgtatctgagcaggttgctccacaggtagctctaggagggctggcaacttagaggtggggagcagagaattctcttatccaacatcaacatcttggtcagatttgaactcttcaatctcttgcactcaaagcttgttaagatagttaagcgtgcataagttaacttccaatttacatactctgcttagaatttgggggaaaatttagaaatataattgacaggattattggaaatttgttataatgaatgaaacattttgtcatataagattcatatttacttcttatacatttgataaagtaaggcatggttgtggttaatctggtttatttttgttccacaagttaaataaatcataaaacttgatgtgttatctctta

SEQ ID NO: 743 - DNA, 3797 bp, HOMO SAPIENS
gcagacggcaaccgggccgctgattgggcggcgaaggagccattcggggagactctggtgggttcggctgccccaagagtgataagttcggcttcagacacgccttagcgccagcagtgagtcggagctctatggaggtggcagcgggtaccgagtggcggctgcagcagcgactcctctgagctgagtttgaggccgtccccgactccttcctcccccttccctcccccttttttttgttttccgttcccctttcccctcccttccctatccccgacgaccggatcctgaggaggcagctgcggtggcagctgctgagttctcggtgaaggtatttcatttctcctgtcccctcccctccccaccccatctattaatattattcttttgaagattcttcgttgtcaagccgccaaagtggagagtgcgattgcagaagggggtgcttctcgtttcagtgcttcttcgggcggaggaggaagtaggggtgcacctcagcactatcccaagactgctggcaacagcgagttcctggggaaaaccccagggcaaaacgctcagaaatggattcctgcacgaagcactagacgagatgacaactccgcagcaaacaactccgcaaacgaaaaagaacgacatgatgcaatcttcaggaaagtaagaggcatactaaataagcttactcctgaaaagtttgacaagctatgccttgagctcctcaatgtgggtgtagagtctaaactcatccttaaaggggtcatactgctgattgtggacaaagccctagaagagccaaagtatagctcactgtatgctcagctatgtctgcgattggcagaagatgcaccaaactttgatggcccagcagcagagggtcaaccaggacagaagcaaagcaccacattcagacgcctcctaatttccaaattacaagatgaatttgaaaaccgaactagaaatgttgatgtctatgataagcgtgaaaatcccctcctccccgaggaggaggaacagagagccattgctaagatcaagatgttgggaaacatcaaattcattggagagcttggcaagcttgatcttattcacgaatctatccttcataagtgcatcaaaacacttttggaaaagaagaagagagtccaactcaaagatatgggagaggatttggagtgcctctgtcagataatgaggacagtgggacctagattagaccatgaacgagccaagtccttaatggatcagtactttgcccgaatgtgctccttgatgttaagtaaggaattgccagcaaggattcgtttcctgctgcaggataccgtagagttgcgagaacaccattgggttcctcgcaaggcttttcttgacaatggaccaaagacgatcaatcaaattcgtcaagatgcagtaaaagatctaggggtgtttattcctgctcctatggctcaagggatgagaagtgacttctttctggagggaccgttcatgccacccaggatgaaaatggatagggacccacttggaggacttgctgatatgtttggacaaatgccaggtagcggaattggtactggtccaggagttatccaggatagattttcacccaccatgggacgtcatcgttcaaatcaactcttcaatggccatgggggacacatcatgcctcccacacaatcgcagtttggagagatgggaggcaagtttatgaaaagccagattagcctgaggcctgctcagtcgttcctaatgaataaaaatcaagtgccaaagcttcagccccagataactatgattcctcctagtgcacaaccaccacgcactcaaacaccacctctgggacagacacctcagcttggtctcaaaactaatccaccgcttatccaggaaaagcctgccaagaccagcaaaaagccaccaccgtcaaaggaagaactccttaaactaactgaaactgttgtgactgaatatctaaatagtggaaatgcaaatgaggctgtcaatggtgtaagagaaatgagggctcctaaacactttcttcctgagatgttaagcaaagtaatcatcctgtcactagatagaagcgatgaagataaagaaaaagcaagttctttgatcagtttactcaaacaggaagggatagccacaagtgacaacttcatgcaggctttcctgaatgtattggaccagtgtcccaaactggaggttgacatccctttggtgaaatcctatttagcacagtttgcagctcgtgccatcatttcagagctggtgagcatttcagaactagctcaaccactagaaagtggcacccattttcctctcttcctactttgtcttcagcagttagctaaattacaagatcgagaatggttaacagaactttttcaacaaagcaaggtcaatatgcagaaaatgctcccagaaattgatcagaataaggaccgcatgttggagattttggaaggaaagggactgagtttcttattcccactcctcaaattggagaaggaactgttgaagcaaataaagttggatccatcccctcaaaccatatataaatggattaaagataacatctctcccaaacttcatgtagataaaggatttgtgaacatcttaatgactagcttcttacagtacatttctagtgaagtaaacccccccagcgatgaaacagattcatcctctgctccttccaaagaacagttagagcaggaaaaacaactactactatctttcaagccagtaatgcagaaatttcttcatgatcacgttgatctacaagtcagtgccctgtatgctctccaggtgcactgctataacagcaacttcccaaaaggcatgttacttcgcttttttgtgcacttctatgacatggaaattattgaagaagaagctttcttggcttggaaagaagatataacccaagagtttccgggaaaaggcaaggctttgttccaggtgaatcagtggctaacctggttagaaactgctgaagaagaagaatcagaggaagaagctgactaaagaaccagccaaagccttaaattgtgcaaaacatactgttgctatgatgtaactgcatttgacctaaccactgcgaaaattcattccgctgtaatgttttcacaatatttaaagcagaagcacgtcagttaggatttccttctgcataaggtttttttgtagtgtaatgtcttaatcatagtctaccatcaaatattttaggagtatctttaatgtttagatagtatattagcagcatgcaataattacatcataagttctcaagcagaggcagtctattgcaaggaccttctttgctgccagttatcataggctgttttaagttagaaaactgaatagcaacactgaatactgtagaaatgcactttgctcagtaatacttgagttgttgcaatatttgattatccatttggttgttacagaaaaattcttaactgtaattgatggttgttgccgtaatagtatattgcctgtatttctacctctagtaatgggctttatgtgctagattttaatatccttgagcctgggcaagtgcacaagtctttttaaaagaaacatggtttacttgcacaaaactgatcagttttgagagatcgttaatgcccttgaagtggtttttgtgggtgtgaaacaaatggtgagaatttgaattggtccctcctattatagtattgaaattaagtctacttaatttatcaagtcatgttcatgccctgattttatatacttgtatctatcaataaacattgtgatacttgatgtagtga

SEQ ID NO: 744 - DNA, 2451 bp, HOMO SAPIENS
agtgcgcgtgcgcagcggttgcctgggcgaccggggaagcgttgggctgtaaagactagggcgccagcggctggcgaagaaggaaagagggtactctctggctgggctggggccgtagcgacgtccgccgcgaacctgggccccccaaagctgcggggcgttcggtgtcgccgaagtaaacatgcaccctgagccctcggagcctgcgacaggtggtgcagcagagctggattgcgcgcaggagcccggcgtggaggagtctgcgggtgaccacgggagcgcaggccgagggggctgcaaggaagaaattaatgatcctaaggaaatatgtgtgggttcttctgacacatcctaccacagccagcagaaacagagtggtgataatgggtcaggtggtcacttcgcacacccaagagaagacagggaagatcggggccccagaatgactaaaagttccctgcaaaaactctgcaagcagcacaagctttatattaccccagcattgaatgatacgctgtatttacactttaaaggttttgatcgcattgagaacctggaagagtacacagggctgcgctgtctctggctgcagagcaatggaatacagaaaatcgaaaacctggaggcccaaactgagttgcgttgcctcttcttgcaaatgaacttgctccgtaaaattgagaacctggaacctctgcagaaactggatgctcttaacctcagcaacaattacatcaagaccattgaaaacctctcctgcctcccagtcctgaacacattgcagatggcccacaatcacctggagaccgtggaggacattcagcatctacaagagtgtttgaggctttgtgtccttgacctttcgcacaacaagctgagtgacccggagatcctgagcattctggaaagcatgcccgatttgcgtgtactgaatttgatgggaaacccggttatcagacagattcctaattacagaaggacagtcactgtacgactaaagcacttaacatacctggatgatagaccagtgtttccaaaggacagagcttgtgcggaggcctgggctaggggagggtacgcagctgaaaaggaggagagacagcagtgggagagcagggagcggaagaagatcacagacagcattgaagccttggccatgatcaagcagcgggcagaggagaggaaaagacagagagagagtcaagagagaggggagatgacatcttcagatgatggtgagaatgtgcccgccagtgcggaaggcaaggaggagcctcccggggacagagaaacaaggcagaagatggagctatttgttaaggaaagctttgaggccaaggacgagctctgcccggaaaagccaagtggagaggagccgcctgtggaggctaaaagagaggatggaggtccagagccagaggggaccctcccagctgagaccctgctactgtcgtcacctgtggaggttaaaggagaggacggagatggagagccagaggggaccctcccagctgaggccccaccacccccgccacctgtggaggttaaaggagaggatggagatcaagagccagaggggaccctcccagctgagaccctgctactgtcaccgcctgtgaaggttaaaggagaggatggagatcgagagccagaggggaccctcccagctgaggccccaccaccaccgcccctgggagctgccagggaagaaccgactccccaggctgtggccactgagggtgtattcgttacagaacttgatggaacgagaacggaagatttagaaaccattagactggagacaaaggagacattctgcattgatgacctacctgacttggaagatgatgatgaaacaggcaaatctctggaagaccagaatatgtgctttccgaagattgaggtcatctcgagcttgagtgatgacagtgaccctgaactggactacacgtcactccctgtgctggaaaacctccccacagacactctgtcaaatatatttgcagtctctaaagacacctcaaaggcggctcgggtgcccttcacagacatctttaaaaaagaagctaagagggacttggaaatccgaaaacaagacaccaagtccccaagacccctgatccaggagctcagcgacgaggacccctctggccagctactgatgccccccacctgccaaagagatgctgcaccactcacttccagtggagacagggacagcgacttccttgcagcctcttctccggtgccgactgagagcgccgccacacccccagagacgtgtgtcggagttgcccagcccagccaagctctgcccacgtgggacctcactgcattcccagcaccgaaagcatcatagttttccccagttatatgtagcataaatggtttaatcataaatgtctcccttaggcatgataaacattttaacacccaaaaaaaaaaaaaaaa

SEQ ID NO: 745 - DNA, 8181 bp, HOMO SAPIENS
tgtttgacccggaagtggctgtgttcagctgacagctgctgataaggtggcggcggcgaaggcagcggcaggtcgggagcaagatggcgctgcggccaggagctggttctggtggcggcggggccgcgggagctggcgcggggtccgccgggggaggcggcttcatgtttcctgttgcaggtgggataagaccccctcaagcaggcctgatgccgatgcagcaacaaggatttcctatggtctctgtcatgcagcctaatatgcaaggcattatgggaatgaattacagctctcagatgtcccaaggacctattgctatgcaggcaggaataccaatgggaccaatgccagcagcgggaatgccttacctaggacaagcacccttcctgggcatgcgtcctccaggcccacagtacactccagacatgcagaagcagtttgccgaagagcagcagaaacgatttgaacagcagcaaaaactcttagaagaagaaagaaaaagacgccagtttgaagagcagaagcaaaagctcagacttttgagcagtgtgaaacccaagacaggagagaagagtagagatgatgctttggaagccataaaaggaaatttagatgggttttccagagatgcaaaaatgcaccctactccagcatcgcaccccaagaaaccaggcccttccttggaggagaagttcctagtatcttgtgatataagtacatctgggcaggaacaaattaaattaaatacttctgaagttggccacaaagccctaggcccaggttccagtaagaagtatcccagtttaatggccagtaacggggttgctgtagatggatgtgtaagtggtaccaccactgcagaggcagaaaatacttcagatcaaaacctgtcaattgaagagagtggtgtgggagtatttccctcacaggatcctgctcagcccagaatgcctccttggatttacaatgagagtttggttccagatgcctataagaaaatcttagaaaccacaatgactccaactggaatagatactgccaaactgtatcccattctgatgtcatctgggcttcccagggaaactcttggacagatatgggccttagctaatcgaactacacctggcaaacttacaaaagaagaactttataccgttctagccatgatagcggtaacacagaggggcgttcctgcaatgagtcctgatgctttaaaccagttcccagcagctcctattccaactttaagtggcttttctatgactctgcctacaccggtgagtcagccaactgtgataccttcaggtcctgcgggctccatgcccctcagccttggacagccagtcatgggcattaaccttgttggaccagtgggtggagctgcagcccaggcttctagtggtttcataccaacctaccctgcaaatcaggtagtaaagccagaagaagatgacttccaggattttcaagatgcttctaagtcaggatcccttgatgactcattcagtgatttccaagagttgcctgcttcttcaaaaacaagtaactcccagcatggaaacagtgccccttctttgttgatgccacttcctggaactaaagcattgccttcaatggacaaatatgctgtgtttaaaggaattgcagctgacaagtcctctgaaaatactgttccacctggagatcctggtgataaatatagtgctttcagagaacttgaacagacagcagagaataaacctttaggagaaagctttgcagaattcagatctgcaggaactgatgatggtttcaccgattttaaaacagccgatagtgtatcaccactagagccaccaacaaaagacaaaacttttccaccatccttcccctcaggaactatacaacagaaacaacaaacacaagtgaaaaaccctctgaacttagcagacctagatatgttttcctcagttaattgcagcagcgagaaaccattgtctttttcagctgtgtttagcacatcaaaatcagtttctacaccacagtcaacaggttctgctgctactatgacagcattggcagcaacaaaaacttctagtttggctgatgattttggagaattcagcctttttggggaatattctggtctagcacctgttggggagcaggatgactttgcagattttatggctttcagtaatagctctatttcatctgagcaaaagccggatgacaaatatgatgcccttaaagaggaagccagtcctgttcctctaaccagcaacgtgggcagcacagtgaagggtggacaaaactcgactgctgcgtctaccaagtacgatgtcttcagacaactttctctggaagggtctggactaggtgttgaagacctgaaagataacactccttcaggaaaaagtgatgatgattttgctgacttccactccagtaaattttcttccataaactcggacaaatccctgggagagaaagcagtggctttcagacacaccaaagaagactctgcatcagtgaagtccttagatctcccttccattggtggcagcagtgttggcaaggaggactctgaagatgcactctctgttcagtttgacatgaaattggctgatgtgggaggagatcttaagcatgtcatgtctgatagctctttggatttaccaacagttagtggccagcatcctcctgctgcagatatagaggacttaaaatatgctgcttttggaagctacagtagcaattttgcagtgagcacacttacaagctatgactggtcagacagggatgatgcaactcagggcagaaaactctctccatttgtcctctcagcaggaagtggatccccctcagccacctcaattcttcaaaagaaagagacttcatttggcagttctgaaaacatcaccatgacatctctctccaaagtaacgacctttgtaagtgaagatgctcttccagagaccaccttcccagctcttgccagttttaaagacacgattcctcagaccagtgagcaaaaggaatatgaaaacagagactataaagatttcacaaaacaggacctgcctacggctgaacggagccaggaggccacgtgtcccagcccagcgtccagtggtgcctctcaagaaaccccgaacgaatgttcggatgactttggagagtttcaaagtgaaaagcccaaaatcagcaaatttgacttcttagtagccacttcacaaagcaaaatgaaatccagtgaagaaatgatcaaaagtgagctggcaacctttgacctttctgttcaaggatcacacaagaggagtttgagccttggtgataaagaaataagccgttcttctccttctccagctttggagcagcctttcagagaccgttccaatactctgaatgagaagcccgccctgcccgtcatccgagacaagtacaaagacctgacgggagaggtggaggaaaatgagagatatgcatatgaatggcagagatgcctggggagtgccctgaatgtcattaagaaggcaaatgataccttaaatggaatcagtagtagttctgtttgcacagaagtaattcagtcagctcaaggcatggaatatttattaggtgttgttgaagtgtacagggtaaccaagcgtgtggagctggggataaaagccactgcagtgtgcagtgagaaactccagcagttgctgaaggacatcgataaagtatggaataacctaatcggcttcatgtcactcgccacactcacaccagatgaaaactcgctggatttttcctcctgtatgttacggcctgggattaaaaatgctcaggagcttgcctgtggagtgtgcctcttgaatgtggactcgaggagccggaaagaagagaagcctgcagaagaacatcctaaaaaagcattcaactcagaaacagacagtttcaagctggcctatggagggcaccagtatcacgccagctgtgccaacttctggatcaactgtgtcgaaccaaagcctcctggcctcgtcctgcctgacctgctctgaacaactcctctgtgaagcattgacttttttttttctgtgacaccccacggggtgacagggaccaataaatagaatgcgagcactgcacagttcgcttccctgaatcgatatgaagaacaccgcaagggacggggcccccgtcatccccacggccagtctgcaggacttcaggtaaaattgtcccacccaaactgcacgtggcaccagaagcttgctcacttatctctacttaagattttctgaaatacggaccacggctttcttgatctaaggaagaacttgctgctgcagtattgaaactgtgaagaactgacatttgaagaaaaatagattaccgttgcgggactagaatgggcgactgcttggagccagtgcttgtttttatctaggacacttactgtcctgtgaagtagaatacatttatctgcatttagtttgttaatgtctgaaatgaataaaaagaggaaattgcgattaaactgatgttctgctttttatggagaagattctgcccatctcccctggacagtagcaggcaggtgagggcagattttacccacttggttgtcacaactgaaccagttctctactccttcccttcacttctgtccactctcaagactttttcccaaaacatgcctgggcactctgcagccgtgaagaatgctcattttgacagaggcccaaatcctgtgtattaggataatatccttccccccgggagccttcgctgcaaacctgttctgccgcatgcaaagactgtgaccatggagttttctcagacaagatttggaaaggcagtggaatgaaatctctttgcagtggcctctctccaaatttccaaagatgactgcatagggaccaacactgcctgactttgcagtatctgtgagaaaaacctgaaaattaattcagggtgaaaatgtggagctctcggcctagtgtaaagtatcaagatgtatatttatgggatagatacatgacttagaagaagtagaagaaaattgtccagaaacagtactgaattttagatagaaaaggctcatgcttcctggagtagggaattgtctttgccatttaatgtgaatgcataaaattaggggaaaaacccaagtggctaagagctgtgttattcctgggaagaactaccaatctagggcacacgtctctctgaattgttgattatgcgctttatgaagagatttttcaatctcgtgtgctttactttgtgtggtttagaccctctgacctagacttttatttttaaactgaaaaagttggtcttgtctatataattgctgcttttacataatttattttcccctctcaggacaaattctgtcttgctccatcttacagcttttccatgttctccaagaaaggtgtggaacattttcattaaacagctgttgctgaggcttctgcttgaccttctgcgtgcccgaatgcacagagaggcaccgaggagagaaaggcttttctcactcgctcccgatgataccgtctctggccattcctgactgaggcagctcactctgaatgggcacctttggagcttttgcccaccacaaggctagtggggtgtttctaacaacacaagtgggacagcttttggcaggcttttcctgaggcctcggcgcttccatcctggacagcaccacttccacatggagctggaatgcaagcaggctgctaattggccttaaaaattctttgtttttttttgagatggagtttcactcttgttgcccaggcttgagtgcaatggcacaatctcagctcagtgcaacctccgcctcccgggttcaagcgattctcctgcctcagcctcgtgagtagctgggattacaggcgtgcaccaccacgcccagctaattttgtatttttagtagaggcaaggtttctccatgttggccaggcttgaactccggacctcaggcgatccgcccgcctcagcctcccaaagtaccgggattacaggcgtgagccactgcgcctggcctaaatttcataacagaaccatgacagcagaatctacctttgcaataagaatgtttcccaggagttagagaccagccctgggcatgatggtaaagaccccagctaattatacaaaaaataattagccgggtaggtggagtgcatctgtggacattcgtggtcccagctactaggtaagctgaggcgggagatcacaagtccaggagtttgaggctgcacgtgacagcgtaggtgatgacagagcgagacactgtctcttaaaaaaaaaaaaaaaaaagtttcccagtttgaatttgtattgctgaagcatttttttgaaatgctatatagatgcctgtcatgtcacagtggcccagtatcaacattttaaaaagctcacttggtagctgggctggtttctattcctgagaaattccagaatgcctcagataaaattccttagtataatccccattttccttaccaaggatggtaggcttagtcactccttgggaggtgccacaggaaaattcagcagatgtcaacagaaaaaaagcctttgctatgaaaagtattcactacctttcatatctcttgaatacttgaaatgtttaattagatgccaccaatagggatccaaggagtgtgggacacggttgcgctgcttttctttataaacgtttattaaaatggctcaacgctgcattcagcttcacctcagctcttcttgtcagccaggagccccgtgtccttggaaactgtagccaaggttacttatttccatactgtgcattgtgtcagcccgcttcaccccactgcttgaatggccattaataagcacttttctttttttggtgggatgttttgcctttaaaatttttatggcttagtgtgtaatttaatttttgtctggacatgcttgagatagaagaggtactggatatatgaggatattttccatgctttatttttcctgtggctactagttagcattccataggggttgtgaatttttaattatttgaatattttgtgtacatatacatatttgaagggttttgggggggtcttatttgtttaaaggtgtcttctgtttgcctatttcaagtgtacttcagctttgcaaagattatagggctgtatgttacagaaataggaaatgctggccctgtactggggaccactacaaaaattccctttagccgggcgtggtggctcacgcctgtaatccccagcactttgggaggccgagccgggtggatcacccgaggtcaggagttcaagaccagcctggccaacatggcgagaccctgtctctactaaaaatacaaaaattagctgggcatggtggcaggtgcctgtaatccgagctactcgggaggctgaggcaggagaattgcttgaaccagagaggcggaggttgcagtgagccgagatcgcgccactgcactccagcctgggcaacaagagcgaaactctgtctcaaaaataaaaaattccctttaacaccttcaaggtcaaatgcctgcctttgtgaacagttaataaactgacattttcagacatttgccattcagaagggagcattgtagcctgctgtagaccattccagcaaatgtcagaatgcagggcaagatgtgtgtcgactatgttttttatgtttaagttacttacttatttcttcaggtaagtgtgtaccaaataacaatactgaaaagccctccccttgccaggccgaggaaataaagcttaagtgaaacagctcttgggggaaaaatgccactttacaaatacttttctaacaaaatagcattataatgaagtttttacttaattccattatttatatgttgacgtgaatgtaagtggttaaaaagtattcatgtgggacatctcattactttgtagctgtggctttattaaccagtgaatgctgtggcccttagcgaaatgcgttgtcttctgcgtgatgtggaattcgcgcctgtattttaaaagatggtgtggtttctcccttgtttgtattttaataaacaactgctctaattgatgtgtttagacattataaagcttcacctttaaaatattttcagggtctgttctgaaatcaccccttgttaaacttctctaaccaaaatacaagtgtagaagaatgtcaggctaaaaaaaaaaa

SEQ ID NO: 746 - DNA, 10325 bp, HOMO SAPIENS
aggagccgggcggaggtgactgccgcgtgtttgcgttgcacgcccaccgcccgaaacacggcggcggcctcagggctgctgcggcctcggcgggggcaggccccggcgcccgcccgcctcccggcctccatcatcccagggtgcaccgcggcgggcgcgggcgcgcggccatgttgcggtagtttgttgttttcttcctgcggaggcgaagggccagctgtggaccgcgaagcgcccggcttcgcctctgcctcctgcagccccctcccttctctgtcctccgtcacccgtacccgggcccggaccaggcacgtcggcccaccagctggcttggtgggggaggctgaaggccgggccccgcgagtgccatggcggccgccctgggagcgagcggaggagcaggcgccggagatgatgactttgaccagtttgataagcctggcgcggaacggtcgtggagaagaagagctgctgatgaggactgggacagtgaacttgaagatgatttacttggagaagatttgctatctggcaaaaagaatcagtcggatttgtcagatgaagagctaaatgatgatcttttgcagagtgataatgaagatgaagaaaatttcagttctcagggtgttacaattagtctgaatgctacatctggcatggttacatcatttgaactctctgacaacactaacgaccaatctggagaacaggaatctgagtatgaacaagaacaaggagaggatgaactggtttatcacaaatctgatggatcagaattgtatactcaagagtacccagaagaaggacagtatgaaggccacgaagctgagttgacagaagaccaaatagaatatgtggaagagccagaggaggagcagctttacactgatgaagtgttagacatcgagatcaatgaacctttagatgaatttacaggaggtatggaaacattggaacttcaaaaggacatcaaagaagaatcagatgaagaagaagaagatgatgaagaatctggacgattacgtttcaaaactgaaaggaaagaaggaacaattattaggctctcagatgtaactagagagagaaggaacattccagaaactttggagctttcagcagaggccaaggcagcattgcttgaatttgaagaaagggagcgacagcataaacaaggacgctacagctccaggcggggaggacggcgaggaggtccgctgatgtgtcgtggtgtgggggaccagaggagagagagcaccgagaggggcaggatgaaggaccacagacctgcgctgcttcctacacagcctcctgtcgtgccccaggctccccctccaccgccaccgccgcctcagcagcagccgatcagaagcctgttccagccgcagccgctgcagccgctgcttccggtgcagcacccgcaccacccatccccgcctcagggaatgcacatgcctccccagctagagaccccaaggatgatgatgaccccgccacccgtgactccacagcagcccaagaacatacacatcaacccgcacttcaaagggacggtggtcacgcctgttcaagtgcccttgctaccagttccgagccagccgagacctgccgtgggaccccagagattcccaggccctccagaatttccacagcatacacctggacctgttcccaacagtttcagccagcccccacgactccctctccaggaccagtggagagccccacccccgcctcaggatcgagaccctttcttcttaggagtttcaggtgaaccaagattcccgagccatctttttctggaacagcgaagtccccctccaccaccaccgcctcctacccttcttaacagtagccatcctgttcctactcagagtcctctaccattcactcagccaggaccagcatttaatcagcaaggacagcagccagtgttcccaagagagcggcccgtacgaccagccttgcagcctccaggtccggtggggattctgcactttagccagcctgggtcggcaaccacacggcccttcattcctcctagacagccgttcctgccaggcccaggacagccgtttctgcccacacacacacagcccaacctgcaggggccgttgcatcctccattgccccctccgcatcagcctcagcctcagcaacctcagcaacagcccccgccacagcaccagcctccgcaccagcccccgcaccagcccccgccccagcaccagcccccaccccagcacccaccacagcacccgccgcagcaccagcaccaccaccaccaccaccacctgtccgtcccgccccctcctttgatgccgatgtctcagccacagttccggcctcacgtacagaccgctcagcctcaggccagcagcagccggatgcagtgcccccagcgccaggggctccggcataatacaacttctcagaatgtaagcaagcggcccatgcagcaaatgcagcccactgcgccaaggaacagcaatttgcgtgaattacccatagcgccgtcacacgtgatagaaatgagcagcagccgctgctctgccacgccctcagcacaagtgaaacctatcgtcagcgcgtcaccaccctcgcgggccgtggcgggttccagaagctcacagggaaagacggaagtgaaagtcaagccagctagccctgtggctcaacctaaagaagaggcaaaaacagaaacagagtttcctgatgaagatgaggaaacaaggttatatcgcttaaagatagaagaacagaaacgcctaagagaagaaatcctgaaacagaaggagttacggcggcagcagcaggctggtgccaggaagaaggagctgctggagagactcgcgcagcaacagcagcagctgtacgctcccccacccccagcagagcaggaagagcaggcactgtcaccatcacccaccaacggtaacccactgttgccctttccaggtgcacaggtcagacaaaatgtgaagaacagacttcttgttaaaaaccaggatgtcagtatttcaaacgttcagcccaaaacatccaattttgtaccatccagtgccaacatgcagtatcaaggacaacagatgaaagcactgaaacatttgagacagaccagaacagttcctcaaagtcagactcagccgctgcataaagtgctcccgatcaaacctgcagatgtggaggagccagctgtcccccagactcctcgagtggcgtccatccagggccggccccaggacacaaagcctggcgtgaaaaggactgtcacgcacaggacaaacagtggtggtggagacgggccccacatcagctccaaggtcagggtgattaagctgtcaggtgggggaggagagagcgatggcttttttcacccagaaggccagccccagcggcttccccagcctccggaagtgggaccacagcctgcccgcaaggtgacgctgaccagggggggcctccagcagcccccacatctgccagcggggccccacgcacactcgcctgtccctccagggatcaaaagcatccaaggaattcacccggcgaagaaggccatcatgcacggacgaggcagaggagtggccggtcccatgggccgggggcgcctgatgccaaacaagcagaacctgcgggtggtggagtgcaagccccagccctgcgtggtgtctgtggaggggctgtcctcgtccaccacggatgcccagctgaagagcctgctgatgtcagtgggacccattcagagtttacagatgcttcctcagcaacggaaagccatagctaagttcaaggagccagcccacgcattagcatttcagcagaaattccacaggcatatgatagatttgtcccacataaatgtggccctgatcgtggagtgagtcctaacaagagagcctgaccttaggctgtacacacactgtggaatttcttcaagggagctgccggccggcgcagaacccccaggagcacaggtctctccgggccgctgtcctgcgtaactgttctccagagcgccagccagccacgggcctgattccagaggagccgaactgacaggacacagcaggctggagttggtgttagattgcttcacattctcttgtcaccaccaagaactccaagtttttcgttttgttttgttttcaaagtgcttacaatgcatgtagacattgttctttgtggtctgactctatgatcgatcacagtgacttagattcaggaaagaacattaacgtcacaagttctaagtagttttcacagcaaagaatatttgataatggttgcacttatcttcagtgcaggttagaagagtcttctcaaccaagcttaactcgagttgtcttctcagccctcaaaaggctcttgtacaaaatgtagattaaaatttgggtgattgttgattgacctttgcataccctggaaagccagggtgtgagtggggtggttgggagtggtgccagttgaacagcagattctgcttcttgtcactgtttcaaaagcgtcaactctgtgttcctagtttcgatgaactccccattcatttttaacacacttcccagataaggcaatgtgctggacaggcacacggcatggccctcggctagagcagggtctgtgatggcctcacctggcagccctctggcctagttcccaccacacatgaggtggtggaatggcctgaaggtggaacagacctgtttttttcctttttaaatgcagtaaggtggcctgtttatcactggctctgtgatacatgacattctttgggaatttggtggccactgcttcagtcacctctgtttttctgaaggctgttccagcagggctgccctgttcatcagcggatgttcactctggcctgccgttccccgtggcatgcggggtgagggtggctttcttccagccccaaatgagacgagtctgtgtcatcattgaaactgcttttcgtaattgcgggtaggttcctgtaggtgagacatattctccataaagctactgtagtagaattcattctgggcaaacactgaaaaaagtgccttacagtatttctgctcatgaaagagtttcactattttggatatattctaaagtggacctgagctatttgagcaaataatgatagggcatactcagacattttagctaccttttatacctacgatttcatgtcacatttactaatagaattaagggaaatagaagcccgttctttcttactgcccctggagggagcatggcgctagggctctcagcctcctagaaggaagggactaaggagacgggcacagacttgcgtcatctcgtttccacagttgacgttttatattactttctcaaattaagttaccaaaacaaactgaagagctgaagcaggtcttccagaccctgcgatcctttctgtagcagtgattctaaagtggcgtttgctgtgtgcttgagagtaacactgcacgctgcaggggctgttgcagcagtcagtcccaggaagccacagcgcttgtaggatctgctaggaccctgcagctgtgctgccgccacctctgctccagagtgtcccagccaaccctcggaagatgggattgccagtcagccctgcctcaccatgcctgcaggaggctgtccagggagcaggtctgtgtgcccatcagcaggttcccatggctgtcactgcccactcatttccacagttagatacggatgtgttgatgtatttcgtctagtttatttggctcagtccacagctgcgttggagtggtgactttggtagcccttgagctctaattaagagagatccaaaccactcagtacccactgggcagtgggaaggcctaccgacttactttatcattgagggcttactgatacaatgaaatgagtttcatgactttttttttttttaaacactttttgaaatagagtgtgctgtgtttaaaaccaaaaatatgcatgttgtctctgaaaagtaggcattgaaacagacttttttgtagtcagtgttaataaaacggatcctgtttgggccttcattgttaaggtggacttcatggccactggaaggtctgttttggtgttacctgagtgtgacacaggccctggggtgtgcgtgtttctctaactgtctacacgtgcacataggcagactttctcatagaatgttcttgaaaggtgattggcaaagtcatgcaggcccgccttaaagcgctgattagaacagtccaacacagtccgacctcactcaatacccacaaccatcgaaaatggattcttagtaccagacaatcccagtaatgaaggtttagtttccttgaaggaaactacagaaaaggaaagaagcagaatgagaaaggaatggtacttaggtgtttggtatgctgctcacgtgaagtcagcccacaccagccaaaccctcgtggaagatctgctgcaaccattatctttgttcttgagttcatcatgcatttaaaatgagatgcaagagcatttagcataccatgtaaatatggaccttttaaaattaaaatactattggaagtgctttcaactcagccacatcttagctattagttctttgtgttgtcttatcaaagtttaatggatacagttccacagttgttgatgtgtttgtgtgtatattcgatttttataaagatggtagtaagtcaatacatttatcctgatctgtgtattatttgttcacaaattcaagaagcttaaaggtcgtaaatatcagtatctcataaggtaaaccaatagctgattatgtggagccaagttacttcttttctttttgcattatcttgttttggttttgtgctgtaatagaagttcacttagctactttagataaccttgcattaccactggtctggccacgtttgttaaatccttatactgatattcttctaaagagtaaatctcatcatttttccagacaaattttgaggggtttctctgttttgtggacaggcagcagcctccgtaggcacccgcaccctgccttgctggaggagatgggatggggcgggaggtggcttcaccataactatttttaatatgggtcattcttagcatgatttgtaaaggtctcaggcaaacagttgttgaagcttgcttctgtggcatttctgaattgtggcagagcttagatcctgcacccaggggtctttttttcaaacagcatcttgctcagttctgtgaacagaaggctttgttactgaaggaggtggaagaggagtttagggtgaaaaggaggaagggatggacagacccaggtgaggagaggcctggggattggggaagctgtcatctcagtgttaataatcaacttgcttctaacacactggcttatcaggggaggtcatccagtccggtcggtggagttgagagcccttgggccagggtgtttggcggcacaggggcatccgctggatggcctggaggagtgggggaggggaacgtcttcactgggtggtgatcagctgggacagttcaggtagggcaggtgagggacccccgaggccctggagccttgtcctgggatgggtttgaagaactcatcactcatcacttgttttcttttggcttttgttgtttttgttttgttctgtttgttttgttttgtatttctttgttattttattgggaaggtaagcggaatgtgctcatagaccatcagacgcttgtcgaaggcaggtcctagtcatgtaattgcacaggacaaggaggtcagcgtgtgtgatggcagcatgctgtgccggcacatcgtggagtcctagaaactctctagtccctgcggctgttcccctcctctgctctctccctggagaggactgccagctcttaagaaacattcctggtgcggtgtctgcagtgccctttgtgggtgacttcaggcttcccgctttcgtggtgctcttcctgggattcgtttttttattaccctccctccctacttgtaggcctcagctatggcttgacgtaatcgcttttagacccaggttggcttcccttcattaagctatgatcctccaccccattttttttttttttaatttggagtgggagggaggggggtgggcgagagaaagctcgaaaggtattattggtttttcaaaaaattagaggtgacgattctaccagggagttgactgataggagtgtgtgcagggcaggaaaggttcggaggcacccgactaccaccactcggaaagccgctagtccagatcgactagggagaggcttagatactttagtgtatttaaagagcatttcagttaactttttcagctatttttaaagtttgtgaatggagtgttattttggacattcttaaatatgaattctccaaaggcatttagccttgacttaatattaaatcctaaggattttatgtaaggtttttttgcaacctatttaattttttttaaatgcctaacttctgaggtgcataagcccgtggtttgtgtactggaactaaagcggaactcactgattcatattggatccccaggtataccttctgctggtagcatatggctggaaaaggccgtttgcctcacacattgtaacctgccttggctagaaaatgcttttaatgtctcaactctctcttttctgtgtcatgttttggtaggaaatctttaagattggcggacggaacaggtattttagtgagacacttctgagtacttgctttttcctttgacttctaaccaactaaaagagaaggaggtcttcatgttgatattttgcttggttttattttactgattttaaaaggtatatagaaaaatgtaggcctttaaaaagaaacagcatgtagttttttattttaatatgttccatagagtggataggcagacaggtactattgtaatgtattctgtatttaataatttaatatactctagaaagtagacctcatgcattcttttagcatgattttcttttaaactgcttttcattttaagggcacccgtggcggaagctggttttgcaaggactgtgtaagctgtatgcgttctagctgtatgcgttctgtagtcttttcttaggtgggtaacattttcaataacgcgcgcacagcacacaggggtgccctgagccgaaggagcaaaaaaagccaccgctcgtttctataatccagctttgcttttcacaggcgtgggatccaggatggtgtcctctgtgaggacttgaactctggggctttaattccactgtttaattttcaggtaccacagcagcaaagcacagagtgtgacctttttcatgtctgagctgattctgtttgctccacgtgcctgcttcttgctactgttcatttagtaatgggatcacctcaccatgccatgctctgggctctccctctctgtccatttctgttttgctttcctggctaaacccatctaccattcttaacactggtagctcctgtcccattccaagactcactctctcagaccttcccatctccctggctttccatgctcctctccctccacctcctggcttcaactgggtgagggccgtattcctgccactctgctccgcctcagccttgagaactccacgtgggctgggtgggaaggtgctgacgattttcacactgtgtttaccactccatcacctctcaacctttgcttcgacaggtcttcactcacgatttattcctccaggtctttgattggagagagtaactttttaattctgttgttttgcagtttggctctgtaggagtgagtggcgattcaaagatgccggcgtcccgcagtgtgcggttcgtgcccttaaccacccgcttctttgtttcccgcccctctgctttcgcaggagctcttgtgcttgagttcagtgttagtggtagcgtggctcactccacttggaggtggcggccgtctgaccgtgtgttactgctttgccgacggggcctcccggccctgatgcgtgtacactctgcgggctgcaccgggtggctctggttgggggcgaagctgtgttgactgggagagcgttggaaattgagacatggagagatgacgggagtgcgtttctctgggtttgatctccatcctgttttctcccagacacaccacacctaccttgggggaatgccgttgcctgttccacccctttgttcacttcgcgttaactgctgtggtaactttttcaggatctgtgtgaagaatggtaatgacgtagttgaaaggaaaatgtactgttgtgtgtttcatttgtgtgatttcgtaccaaaaaaatgtgtttgaactatattgtatgtaatttggaagtcgtgttaataaaaccctgcagtttccactctg

SEQ ID NO: 747 - DNA, 2057 bp, HOMO SAPIENS
cccgccccgctcccgggatcggccgcgcgggcgcctctaggaccccgcgtcccgcccgctctcctcccctcccgagccgcgaacttttccggaggcggcggcctcggctgccgctgggtcccggggtcgcgggccctgattgcgccgtttccccgcgcagagctcgccggcgccccgacgggccccggagcagcggcccccggccggcccggcctcagcctggagctccagctacccacatgcaccttacctgggttccgcccggtccctgagtccccacaaaatggctgatggaggaagccccttcctaggtcggagggactttgtctacccttcctcaacccgagaccctagtgcctctaacggagggggcagcccagccaggagggaagagaagaagagaaaggccgccaggctcaagtttgacttccaggcgcagtcccccaaggagctgactctgcagaagggtgacattgtctacatccacaaggaggtggacaagaactggctggagggagagcaccacggccgcctgggcatcttccctgctaattatgtggaggtgctgcccgcagatgagatccctaagcccatcaagcccccgacctaccaggtgctggagtatggagaggctgtggcccagtacaccttcaagggggacctggaggtggagctgtccttccgcaagggagagcacatctgcctgatccgcaaggtgaacgagaactggtacgagggacgcatcacgggcacggggcgccaaggcatattccctgccagctacgtgcaggtgtctcgtgaaccccggctccggctctgtgacgacggcccccagctccccacgtctccccgcctgaccgctgccgcccgctcagcccgtcaccccagctccccctcagccctgcgcagcccagctgaccccatcgacttggggggacagacctccccccgtcgcactggcttctccttccccacccaggagcctagaccccagacccagaatcttggcacccctggtccagctctgtcccactctcgaggtcccagccatcccctggacctggggacctcctctcctaacacctctcagatacactggaccccgtaccgggcgatgtaccagtacaggccccagaacgaagacgagctggagctgcgcgagggggacagggtggatgtcatgcagcagtgtgacgatggctggtttgtgggtgtctcccggaggacccagaaattcggaacgttccctggaaattacgttgccccggtgtgagtggtctccatggcaacttggagccagccaggatggggtggggagcggtggcactcgtgggagggagaggacccccgcccacatcctccttccccaggacctgagctcccagcatctgcagacgacccccgcagcctttccctcggacccccctcgaagccccctggactgattcccacccacgactcacaggcattcctcccacagccctttcatttcctccccaccccactccccaaatacagaggtctgctttgaagcggagaccatttccaggccttattgagaccagaccccaagtcccccacccccatcctgctccagcgtttcctctaacagggaccagctctccgctttgcccccacggggttcctctaaccagaaccagcttcctagcctcgtagagaccaaaggccgcccccgcctgctggggttcctcccagcaccccagcttgctggctgccctctttgccttctggcctccagctgggtgtgggggggcggagcaaggcgggggacagacgcagcaccttcttagcgatctaggcctggcaagagctctggccccaaggcctcctcttcccaggggctgccaagtcctggccctggccctggcatatcaccccgcactgtggggccaggcaccactagcctggctcaaatattccccagggagactgctgtgtgctgcccgcctgcctgctggctctcccccagccccacatcccctctggaagagaatgtaaaataaacctggacacaagggaaaaaaaaaaaaaaaaaa

SEQ ID NO: 748 - DNA, 5379 bp, HOMO SAPIENS
tggataggagagctggcgcagctgccctggtggcagtggctgaagtggcggcggcttcggcggctgcggcggctgcaacagcttcgggctcggggttttggcggcggcgccggcgggctaggctgcgcggtgcggaccccggcgcgcggtccgggttgctggggcggcgcgtaagatgcctctaatggaggagtttctgagcagcacccctggcccagtggctttgaaagggagctcaaaccagagactatttcaagccctggatatcatatcctgagggccacaggagaagagaacatggctgtgagtttggatgacgacgtgccgctcatcctgaccttggatgagggtggcagtgccccactggctccctccaacggcctgggccaagaagagctacctagcaaaaatggcggcagctatgccatccacgactcccaggcccccagtctcagctctgggggtgagagttccccctccagccccgcacacaactgggagatgaattaccaagaggcagcaatctacctccaggaaggcgagaacaacgacaagttcttcacccaccccaaggatgccaaggcgctggcggcctacctctttgcacacaatcacctcttctacctgatggagctggccacggccctgctgctgctgctgctctccctgtgcgaggcccccgccgtccccgcactccggcttggcatctatgtccacgccaccctggagctgtttgccctgatggtggtagtgtttgaactctgcatgaagttacgctggctgggcctccacaccttcatccggcacaagcggaccatggtcaagacctcggtgctggtggtgcagtttgtcgaggccatcgtggtgttggtacggcagatgtcccatgtgcgggtgacccgagcactgcgctgcattttcctggtggactgtcggtattgcggtggcgtccggcgcaacctgcggcagatcttccagtccctgccgcccttcatggacatcctcctgctgctgctgttcttcatgatcatctttgccatcctcggtttctacttgttctcccctaacccttcagacccctacttcagcaccctggagaacagcatcgtcagtctgtttgtccttctgaccacagccaatttcccagatgtgatgatgccctcctactcccggaacccctggtcctgcgtcttcttcatcgtgtacctctccatcgagctgtatttcatcatgaacctgcttctggctgtggtgttcgacaccttcaatgacattgagaaacgcaagttcaagtctttgctactgcacaagcgaaccgctatccagcatgcctaccgcctgctcatcagccagaggaggcctgccggcatctcctacaggcagtttgaaggcctcatgcgcttctacaagccccggatgagtgccagggagcgctatcttaccttcaaggccctgaatcagaacaacacacccctgctcagcctaaaggacttttacgatatctacgaagttgctgctttgaagtggaaggccaagaaaaacagagagcactggtttgatgagcttcccaggacggcgctcctcatcttcaaaggtattaatatccttgtgaagtccaaggccttccagtatttcatgtacttggtggtggcagtcaacggggtctggatcctcgtggagacatttatgctgaaaggtgggaacttcttctccaagcacgtgccctggagttacctcgtctttctaactatctatggggtggagctgttcctgaaggttgccggcctgggccctgtggagtacttgtcttccggatggaacttgtttgacttctccgtgacagtgttcgccttcctgggactgctggcgctggccctcaacatggagcccttctatttcatcgtggtcctgcgccccctccagctgctgaggttgtttaagttgaaggagcgctaccgcaacgtgctggacaccatgttcgagctgctgccccggatggccagcctgggcctcaccctgctcatcttttactactccttcgccatcgtgggcatggagttcttctgcgggatcgtcttccccaactgctgcaacacgagtacagtggcagatgcctaccgctggcgcaaccacaccgtgggcaacaggaccgtggtggaggaaggctactattatctcaataattttgacaacatcctcaacagctttgtgaccctgtttgagctcacagttgtcaacaactggtacatcatcatggaaggcgtcacctctcagacctcccactggagccgcctctacttcatgaccttttacattgtgaccatggtggtgatgacgatcattgtcgcctttatcctcgaggccttcgtcttccgaatgaactacagccgcaagaaccaggactcggaagttgatggtggcatcacccttgagaaggaaatctccaaagaagagctggttgccgtcctggagctctaccgggaggcacggggggcctcctcggatgtcaccaggctgctggagaccctctcccagatggagagataccagcaacattccatggtgtttctgggacggcgatcaaggaccaagagcgacctgagcctgaagatgtaccaggaggagatccaggagtggtatgaggagcatgccagggagcaagagcagcagcgacaactcagcagcagtgcagcccccgccgcccagcagcccccaggcagccgccagcgctcccagaccgttacctagcccagcgcccgaaagccgtctcttctatgcaataacacaatagtattactctactgcgatgtacggaactgcggtgtgtgtacacatactcacgtatatgcacatatttatatacaggaagaaaaaagacagacaagatggggcttggtttataaccaccttgccctgtcttccttaactccagaagccagtttggtgaggggtgggggtgcggccaccaggtctgagctcttcctactgtggaaggctccagaaggcccttcacaaggagacccctcacctggatccagtcgactgcggggcttgcccctcatgtgggctggcctccatcggccacgtccaaagctgtcactgctactgcttcaggctcacatccccccgacctgatggcgtgcccgccccctctccctgcggcccatgccacaggtttctgtgttttgctttagggacagaaccacttaggaaggaaagaactcccggtctccagggtggtatttcagtgtctgtgataatgtcacgcaacacctcttcggggaccagtgcccaggatctaatggaagcggaattggggcaactgggcccatgtggccagagctcagttagccagtgccgggcggccacagattacactgaccaatctcctcccttggctctgcaagcctcccacccagccttctctggcttaacccttgttggcgaaaactcttccacagtggcctccttggggacccagaacccggaggaaggggcatgaggcaggaagtggggccgatgtctgcaacccagaccacttcgtggaatgggctcttgaccaaatccctttttttgcgatttacccgttcaagcaaaacaacgttttggttaactaaggattgtgctaaagccgataccaggtccttcacacgtgtgcactaggaacaggagcgaacagcacagagagacgctccctgtgggacgcagcagccccgtggccccggcccagttcccagccaccctccctggctctgctcacaccagagatttccatagcaggagcggttggtgcagaagtaggttcagatgaacctcagttaacgtcgccacccctcctcccaccatggtaccctgtaggagccctgtatgacatctgagcgtggtggaggtaggagggttgccagctgcagtgaccctgccacagaggcagggtcagtgcagaggtcgctttggttccgcttccctgggccacagaacggaacacagcataggttctgcagcaggagccgcagtggcaggatggagggtgcgaagggcaaggagtgcactgctgggcattcctggccagccccggccctctggtgcctgcttcctgtgacttcagaaggcaggtggacagagcctccctctggccttgtcctcttcccagccacagaacgggcagggtggcacccgaccccaggggagcagtacctggtcccccaccccctcctcccaaccacctccaaggccaagctgggtcccatagccagcacggcatggttctccccttccccccttcccaggtcaggggagttggacaagtagcaggtgtttgtttttaaagcacagccctttgggaaagcaacacattattgagactcactgtgattcccccgggagtcagactggctttgtcctcttcctctctggagggccatgggccatcagcaggagctccacatcgagccccaggccagaaccccctccctttcacagagagggaactttattgcacaattgggtgccttttagcttttgtgtgttgaaatgggcgttttggaagcaagggtcaggggacagcttctaaaggtgtgagtctctgacctgagcatctgggcctcgcctgggcccttcttcctccccaggggtggaaacgtggaggggccagcagcaccccggggtctgcccaggggagtcaaggccccgaggtgggggggcctattccaggaggagtgggatctcggccctgtccagagcgagttaatgtgtccatctgcccaaccctgtcctgagaaaggacctggttttggccaggacctgacaaatacccaatggcagcagtgtcaacagacgggagtccagccagggtgggtgcccttgtcattgaggttagggacagctatccccaggttatgcctggccccacccagcagggagttggggtccccccacaggctgtgagctctgtgggccctgggatgtgatctagctcagatgccctctcatccttgatgtcatagttgagtgcacccaagtggcacccactggcggccaggggcacagcctggtggtggtggcaatagaactgtgcccctcctcagctcctcgcttcccctcccacagccccagccttactccaccatgcggacaatcattttgtacggatcacgggagcaatgctgtacggttttgtacactggtggtttgtttcctagaaaacccattgtgtctctggatttctagcacattactaaaagagcctctgctttgtaaaaaaaaaaaaaaaaaaaaaaaaaaaaaaaaaaaaaaaaaaaaaaaaaaaaaaaaaaaaaaaaaaaaaaaaaaaaaaaaaaaaaaaaaaaaaaaaaaaaaaaaaaaaaaaaaaaaaaaaaaaaa

SEQ ID NO: 749 - DNA, 2239 bp, HOMO SAPIENS
cggcgtctctctcccccgcgccagctcccgtacacggagccgcattccttggcccccccacccccctccctcggggcccccccgcccccctcgggaaaaaaatccaccccgaatcactcgaacccgagggaggcttcctttcacccttggggagacgagctttcaacggttacctcttcttcgtctccccccaagcccccgtcccctccccctgctcccacccccttctggcgccgggtgtaaggtccctttaaggcgacggcgccttcctcgggtcagactaccggcggcgacgaccacaggagcatggcggacaccgacctgttcatggaatgtgaggaggaggagttggagccatggcagaaaatcagtgatgtcattgaggactctgtagttgaagattataattcagtggataaaactaccacagtttctgtgagccagcagccagtctcggctccagtgcccatcgctgcccatgcttctgttgctgggcacctctctacatccaccaccgttagtagcagcggggcacagaacagcgacagtacaaagaagactcttgtcacactaattgccaacaacaatgctggcaatcctttggtccagcaaggtggacagccactcatcctgacccagaatccagccccaggtctgggcacaatggttactcaaccagtattgaggcctgttcaggtcatgcagaatgccaatcatgtgactagttcccctgtggcctcacaaccaatatttatcactacgcagggatttcctgtaaggaatgtccggcctgtacaaaatgcaatgaatcaggttgggattgtgctgaacgtacagcaaggccaaacggttagaccaattacactagttccagccccaggtacccagtttgttaagccgacagttggagttccacaagtgttctcccagatgacccctgtgaggccaggctccacaatgcctgtgaggcccaccaccaacaccttcaccaccgtcatcccggccactcttaccattcgaagcaccgtcccacagtcccagtcccagcagaccaagtccactcccagcacttctaccactcccactgccacacagccaacctcactggggcaactagctgttcagtctccaggccagtcaaaccagaccacgaatcccaagctagctccctccttcccctctccacctgcagtgagcattgccagctttgtcactgtgaagcgacctggtgttacaggcgaaaatagcaatgaagtggccaaattggtgaatacccttaacaccatcccttccctgggccagagtcctgggccagtggtggtgtccaacaacagctctgctcatggctctcaaagaaccagcggacctgagtcttcaatgaaaggtacaataacctgaaagactctgagcagccagtcattcaaaaacattaataaagtgtttgttgtatcagagctttatactcagaaatagaaaaataaaataaaatacagctgctgtagtttgttcttacagaaactttagtaaggagaaagccacttacaaaaagtgtaactgaatcagctccaagaaattatgtgtgtaattgtgctttggagattagtgaaattgattgattaaagatgggtgagataatgaaagataacttcatggaagagatggatttctgagcaaggttttaaagttaggatttggtagagagatcttcaggttgagaatgatgagcatgagggttttcagtggtctagagcaggggtcggcaaatgttttctgtaaagggcctagtagtaaagttgtaggctttgtgcacaatatatagcctctgttgcagctattaactgtgctgttgtggtggggaagcagccacagatacataaacgaatgagcatggctgtgctccactaaaaactatttatggactctgaaatttaagtttcataaaattttcatgtgtcgaaaagttttattcttttatttcaaccatttaaaaataaaaaccgcaaggtatagtggctcacacctcatcccagcattatgggaggccaagacgggaggatcacttgagcctaggagtttgagaccagcctgggcaacatggtgagatcccatctctacaaaaaaaaaaaaaaaaaagattagccaggcgtggtggtgtatgtctgcagtcctcgctactcagaagtctgaggtgagaggatggcttgggcttgaacccagaaggttgagcctgcagtgagcc

SEQ ID NO: 750 - DNA, 2783 bp, HOMO SAPIENS
gattgcgagccaggaggaggaagccggcggtggccccgtcagcagccggctgctgagaggccggtaggcggcggcggtcccgaggggcggcggccgcgctgctccctgagaacgggtcccgcagctgggcaggcgggcggcctgagggcgcggagccatgaagctgtacagcctcagcgtcctctacaaaggcgaggccaaggtggtgctgctcaaagccgcatacgatgtgtcttccttcagctttttccagagatccagcgttcaggaattcatgaccttcacgagtcaactgattgtggagcgctcatcgaaaggcactagagcttctgtcaaagaacaagactatctgtgccacgtctacgtccggaatgatagtcttgcaggtgtggtcattgctgacaatgaatacccatcccgggtggcctttaccttgctggagaaggtactagatgaattctccaagcaagtcgacaggatagactggccagtaggatcccctgctacaatccattacccagccctggatggtcacctcagtagataccagaacccacgagaagctgatcccatgactaaagtgcaggccgaactagatgagaccaaaatcattctgcacaacaccatggagtctctgttagagcgaggtgagaagctagatgacttggtgtccaaatccgaggtgctgggaacacagtctaaagccttctataaaactgcccggaaacaaaactcatgctgtgccatcatgtgatgcagcctgccagaggcccaatgctggaatggcaccatcattcacatcagaactgcagcccctggaaaagaagagacagccatagacgaggagccagagtgggggcagactggccatttttattttgaagttcctgcgagaaatggatggtggaagggtggcgaatgttcaaattcatatgtgtggtagtgattcttggaaagaatttgaggtccccaaaggtgtatttttgggcaaatgaaaccataaactccgactggcttctgtagatgccaaagggctctttttcagctaaccctgggaaggctctgtgggagggaggtcggagccagctgtttctcgatctttggtatatctttggatcttatttgtacattaatgatattaacactccagtggggggtggggagtccctgatgctagggctggggtgggtggagtttgaagactcttgggaaagcctctcctggggccactgttgggggtgggagtgagcccaccacagaggccacaggcaggcccccacttcaggcccaaggcctggggcggggggaacagtcactgggtctcagattctgagactgttgtttagcttacctttctgctaggattggcttcccgcagagggcagggcccatcctaagcagcttccaagtcccacaaaggtggcttgtgggaggatttggaaggagctgcattgtgggcggggagtgtgtgggttgggttcgtaccagcaagtagactaggaactgagcccaggaaagggggatgttttcctggtgtttggatggtcagctgggagtgtccatcatcaggggaagatcaaacacaggtgcactcagctgcccagggcctctgggacacttgccttgacttgcaacttgccttgaacatcacgatcaaagcagcaggtgctgtggtctctcaaaattgatttttatttgactctgtggctctaagactgccttgaaccgcctgaggcctatgcatctgaacaagtgggtctctcccttgagcaccaggagtgggtgccagccggccccgaggattcccagcaccccacctatggtcttgccagcataggcttgctagttccttcttggtcagaggtagctgcagaggggggaggccaagggtttggtctaagctgtgccctgccacctggcaggaggcccactcactgcccaagtcatggcaacaggctggagcagcccaggagatgggcctaaaatgttctggatcccttgggtcctagtgttatgttccagtctgcccacctgtgctcaggatgcagccctgggatccagcacccatggaagcttctgctgggatggtgtcacctatgggttttgaaccagtgtggtatggtccttgggagctctgctctgagcttgccacactgctgagagcacccactgtcctgaccagagtctcagtggtcctgacccccaatgtgggcaggggctgggcaggagggtggggtctgctgtgggttcagaggactccacctcctggctggtttacctgctgctgcccattttctctgggtactgctggccagaggactttagcctacccctgaagagcctgtccatgtcattttcctactgccatagataccctaagcccagggccccttgaggcccagactcagcctgcccactggtgccggagacggagtggagtgggcctggatccgagggatgctacctctccctttcccacttgaggaccctggggagagatgggggcggggaaaatggaggtatgaatttggggtaagaggaagtgagatctccgcttgcaggtcagcccctgccttgcagggcgggctggcttgactcaggccctgtgagatagagggcccagcccagccccacccacagatcccctgctcctgttgtgttctgttgtaaatcatttggcgagactgtattttagtaactgctgcctaacttccctgtgttctatttgagaggcgcctgtctggataaagttgtcttgaaatttcaaaaaaaaaaaaaaaaaa

SEQ ID NO: 751 - DNA, 2810 bp, HOMO SAPIENS
gggcgggcgcgcgggcgcgcgggcccgcgcaggcggtggcggcggcggcggaaccgagctgacgggcgtgcggccgctgcgccgcaaactcgtgtgggacgcaccgctccagccgcccgcgggccagcgcaccggtcccccagcggcagccgagcccgcccgcgcgccggagaagaagacacatgaattagagacagcacgggggagcaggctgtggagctgggagtgacggggtgagtccaggaaggctgcctggaggagatgcccaggagagaagtttgctgggaggcagctcatttccggcaggaggagcagagcctgccaaggcctcgagttcgtgccctcgtgaggctggcatgcaggatggcaggacagcccggccacatgccccatggagggagttccaacaacctctgccacaccctggggcctgtgcatcctcctgacccacagaggcatcccaacacgctgtcttttcgctgctcgctggcggacttccagatcgaaaagaagataggccgaggacagttcagcgaggtgtacaaggccacctgcctgctggacaggaagacagtggctctgaagaaggtgcagatctttgagatgatggacgccaaggcgaggcaggactgtgtcaaggagatcggcctcttgaagcaactgaaccacccaaatatcatcaagtatttggactcgtttatcgaagacaacgagctgaacattgtgctggagttggctgacgcaggggacctctcgcagatgatcaagtactttaagaagcagaagcggctcatcccggagaggacagtatggaagtactttgtgcagctgtgcagcgccgtggagcacatgcattcacgccgggtgatgcaccgagacatcaagcctgccaacgtgttcatcacagccacgggcgtcgtgaagctcggtgaccttggtctgggccgcttcttcagctctgagaccaccgcagcccactccctagtggggacgccctactacatgtcaccggagaggatccatgagaacggctacaacttcaagtccgacatctggtccctgggctgtctgctgtacgagatggcagccctccagagccccttctatggagataagatgaatctcttctccctgtgccagaagatcgagcagtgtgactaccccccactccccggggagcactactccgagaagttacgagaactggtcagcatgtgcatctgccctgacccccaccagagacctgacatcggatacgtgcaccaggtggccaagcagatgcacatctggatgtccagcacctgagcgtggatgcaccgtgccttatcaaagccagcaccactttgccttacttgagtcgtcttctcttcgagtggccacctggtagcctagaacagctaagaccacagggttcagcaggttccccaaaaggctgcccagccttacagcagatgctgaaggcagagcagctgagggaggggcgctggccacatgtcactgatggtcagattccaaagtcctttctttatactgttgtggacaatctcagctgggtcaataagggcaggtggttcagcgagccacggcagccccctgtatctggattgtaatgtgaatctttagggtaattcctccagtgacctgtcaaggcttatgctaacaggagacttgcaggagaccgtgtgatttgtgtagtgagcctttgaaaatggttagtaccgggttcagtttagttcttagtatcttttcaatcaagctgtgtgcttaatttactctgttgtaaagggataaagtggaaatcatttttttccgtggagtggtgattctgctaacatttttatctacgttttataacttggtgagtgacgatgagagccctgcacctggccagagtgtcacaggcaaaaggcatcgggaagcaggagcatcttcttggcagccaggctgggccatcttctcctggacacctgctgtgtaccaggaacttcgtcacctccttgaatgctggcggttcatttcatgatcagtgttaagcattttcctccatgggaaggaagcatgggatatagaaaagcgaagggctgtcctttacaaattctggttctgcaacttcctagcgtgactttgggcttgggcaagtttcttagccgttctgagccttcatttcctcatctgtacaatgagattaatagtacctatcatctaccttcaggattgctgacagacagaatttgaaataaaatatgcaagttagctaatacaaaaagtagatgatccaaaaatggtagccactcacccttcacaaactgaagtccatggaccacggaagtcgagaattaatgtacacctgtatcatgtgtaggaaaccagaaatgtgttccttatttcttgttcccaaacaggattaactgtgaagactaatttataaatgtgaacctaagaaaactccacctctgaaggaaatcatttgaattttgtttttgtacgtaaagttaaccttccaattgtctgagctgtcgtcactgacttcatgacagtctggccctccagacaagagcagcgctggcatcgggcaggtgattcctgacacctgctgcctgcaggcattcactgaccaggcctttcctggaggaaacacccagggccgggcggctgctgtttccacacgtggactcggatctgctgtgacaccgtcagcccgacagtctctccatatgcagcctttcctctgtacttttctccatggttgaaataaaacagggtgactgggagttacttagaattcatgaagattttaaaaaaaaaaaaaa

SEQ ID NO: 752 - DNA, 3594 bp, HOMO SAPIENS
gtctatcagcgatttcatcttcaggcctggactacaccactcaccctcccagtgtgcttgagaaacaaactgcacccactgaactccgcagctagcatccaaatcagcccttgagatttgaggccttggagactcagatcctgaacaagagagaacaaaatctctactttgatggaacttccattctgtggggaagagactgacaataagcaattaaataaataagaactcagcagtaggccttgcctcagatccaaggtcactcggaagaggccatgtctaccctcaatgacactcatggaggaaatgctgagagaagcattcagatgcatgacacaaggtaagactgccaaaaatcttgttcttgctctcctcattttgttatttgttttatttttaggagttttgagagcaaaatgacaacacccagaaattcagtaaatgggactttcccggcagagccaatgaaaggccctattgctatgcaatctggtccaaaaccactcttcaggaggatgtcttcactggtgggccccacgcaaagcttcttcatgagggaatctaagactttgggggctgtccagattatgaatgggctcttccacattgccctggggggtcttctgatgatcccagcagggatctatgcacccatctgtgtgactgtgtggtaccctctctggggaggcattatgtatattatttccggatcactcctggcagcaacggagaaaaactccaggaagtgtttggtcaaaggaaaaatgataatgaattcattgagcctctttgctgccatttctggaatgattctttcaatcatggacatacttaatattaaaatttcccattttttaaaaatggagagtctgaattttattagagctcacacaccatatattaacatatacaactgtgaaccagctaatccctctgagaaaaactccccatctacccaatactgttacagcatacaatctctgttcttgggcattttgtcagtgatgctgatctttgccttcttccaggaacttgtaatagctggcatcgttgagaatgaatggaaaagaacgtgctccagacccaaatctaacatagttctcctgtcagcagaagaaaaaaaagaacagactattgaaataaaagaagaagtggttgggctaactgaaacatcttcccaaccaaagaatgaagaagacattgaaattattccaatccaagaagaggaagaagaagaaacagagacgaactttccagaacctccccaagatcaggaatcctcaccaatagaaaatgacagctctccttaagtgatttcttctgttttctgtttccttttttaaacattagtgttcatagcttccaagagacatgctgactttcatttcttgaggtactctgcacatacgcaccacatctctatctggcctttgcatggagtgaccatagctccttctctcttacattgaatgtagagaatgtagccattgtagcagcttgtgttgtcacgcttcttcttttgagcaactttcttacactgaagaaaggcagaatgagtgcttcagaatgtgatttcctactaacctgttccttggataggctttttagtatagtatttttttttgtcattttctccatcaacaaccagggagactgcacctgatggaaaagatatatgactgcttcatgacattcctaaactatcttttttttattccacatctacgtttttggtggagtcccttttgcatcattgttttaaggatgataaaaaaaaataacaactagggacaatacagaacccattccatttatctttctacagggctgacattgtggcacattcttagagttaccacaccccatgagggaagctctaaatagccaacacccatctgttttttgtaaaaacagcatagcttatacatggacatgtctctgccttaacttttcctaactcccactctaggctattgtttgcatgtctacctacttttagccattatgcgagaaaagaaaaaaatgaccatagaaaatgccaccatgaggtgcccaaatttcaaataataattaacatttagttatatttataatttccagatgacaaagtatttcatcaaataacttcatttgatgttccatgatcaagaaagaatccctatctctattttacaagtaattcaaagaggccaaataacttgtaaacaagaaaaggtaacttgtcaacagtcataactagtaattatgagagccttgtttcataaccaggtcttcttactcaaatcctgtgatgtttgaaataaccaaattgtctctccaatgtctgcataaactgtgagagccaagtcaacagcttttatcaagaatttactctctgaccagcaataaacaagcactgagagacacagagagccagattcagattttacccatggggataaaaagactcagactttcaccacatttggaaaactacttgcatcataaatatataataactggtagtttatatgaagcagacactaagtgctatagacactctcagaatatcatacttggaaacaatgtaattaaaatgccgaatctgagtcaacagctgccctacttttcaattcagatatactagtaccttacctagaaataatgttaacctagggtgaagtcactataatctgtagtctattatttgggcatttgctacatgatgagtgctgccagattgtggcaggtaaagagacaatgtaatttgcactccctatgatatttctacatttttagcgaccactagtggaagacattccccaaaattagaaaaaaaggagatagaagatttctgtctatgtaaagttctcaaaatttgttctaaattaataaaactatctttgtgttcttttctgcaacagatgattccaacatgggtgtttgtctattcttctttactcttgaaacattagaccatgggaggctcttacagccttgagttgatatttatacaacccaaatctaggtttgaacggtgaggtgtcaggtcatcaaatattcatgtctatatagtcttacacaggttctcaaaaaaaatgttcatgggataggtcattgataatggattccttattctgagaactccagacgactgaaatatatgagagaaggaaaaggacatagtaggagcaggcctgagaaaaaaatgaaagtcagaaatctttaaaaaaatacaagatcttatttctatcttattttttctcctcttctgaaatatatatgaggattcctctccaaacccatggtttctctaagaattttgagtcatttgtatgacctcaaataattagttttagctgacctcacataactccttataataggagacatctttaatgtctgctattaaagaaggatgaaaattcctatgaccttctccccgattatccctttggcaatatagagtcaaataataacattgaccaatagtaaacatgctttgccaagaagtagaagatatattctctagccttagtttttcctcccaatttgcatttttgtaaaaataatgttgtatccacaaaggaaataaactttaaaaacccaagtgca

SEQ ID NO: 753 - DNA, 3039 bp, HOMO SAPIENS
gactttcactttccctttcgaattcctcggtatatcttggggactggaggacctgtctggttattatacagacgcataactggaggtgggatccacacagctcagaacagctggatcttgctcagtctctgccaggggaagattccttgacttctggggtgatggagaagaaacaggctgtgctgtgtccctaatgggaaacgtggctgagacaggggagtgagaagggtgcgttgcagaatggtgcctgtggcatgatgccagctttgcaatcatgagattcaaaagccacactgtggaattgaggaggccctgcagcgacatggagggagctgctttgctgagagtctctgtcctctgcatctggatgagtgcacttttccttggtgtgggagtgagggcagaggaagctggagcgagggtgcaacaaaacgttccaagtgggacagatactggagatcctcaaagtaagcccctcggtgactgggctgctggcaccatggacccagagagcagtatctttattgaggatgccattaagtatttcaaggaaaaagtgagcacacagaatctgctactcctgctgactgataatgaggcctggaacggattcgtggctgctgctgaactgcccaggaatgaggcagatgagctccgtaaagctctggacaaccttgcaagacaaatgatcatgaaagacaaaaactggcacgataaaggccagcagtacagaaactggtttctgaaagagtttcctcggttgaaaagtgagcttgaggataacataagaaggctccgtgcccttgcagatggggttcagaaggtccacaaaggcaccaccatcgccaatgtggtgtctggctctctcagcatttcctctggcatcctgaccctcgtcggcatgggtctggcacccttcacagagggaggcagccttgtactcttggaacctgggatggagttgggaatcacagccgctttgaccgggattaccagcagtaccatggactacggaaagaagtggtggacacaagcccaagcccacgacctggtcatcaaaagccttgacaaattgaaggaggtgagggagtttttgggtgagaacatatccaactttctttccttagctggcaatacttaccaactcacacgaggcattgggaaggacatccgtgccctcagacgagccagagccaatcttcagtcagtaccgcatgcctcagcctcacgcccccgggtcactgagccaatctcagctgaaagcggtgaacaggtggagagggttaatgaacccagcatcctggaaatgagcagaggagtcaagctcacggatgtggcccctgtaagcttctttcttgtgctggatgtagtctacctcgtgtacgaatcaaagcacttacatgagggggcaaagtcagagacagctgaggagctgaagaaggtggctcaggagctggaggagaagctaaacattctcaacaataattataagattctgcaggcggaccaagaactgtgaccacagggcagggcagccaccaggagagatatgcctggcaggggccaggacaaaatgcaaacttttttttttttctgagacagagtcttgctctgtcgccaagttggagtgcaatggtgcgatctcagctcactgcaagctctgcctcccgtgttcaagcgattctcctgccttggcctcccaagtagctgggactacaggcgcctaccaccatgcccagctaatttttgtatttttaatagagatggggtttcaccatgttggccaggatggtctcgatctcctgacctcttgatctgcccaccttggcctcccaaagtgctgggattacaggcgtgagccatcgcttttgacccaaatgcaaacattttattagggggataaagagggtgaggtaaagtttatggaactgagtgttagggactttggcatttccatagctgagcacagcaggggaggggttaatgcagatggcagtgcagcaaggagaaggcaggaacattggagcctgcaataagggaaaaatgggaactggagagtgtggggaatgggaagaagcagtttactttagactaaagaatatattggggggccgggtgtagtggctcatgcctgtaatccgagcactttgggaggccaaggcgggcggatcacgaggtcaggagatcgagaccatcctggctaacacagtgaaaccccgtctctactaaaaatacaaaaaattagccgggcatggtggcgggcgcctgtagttccagctaactgggcggctgaggcaggagaatggcgtgaacctgggaggtggagcttgcagtgagccgagatatcgccactgcactccagcctgggtgacagagcgagactccatctcaaaaaaaaaaaaaaaaagaatatattgacggaagaatagagaggaggcttgaaggaaccagcaatgagaaggccaggaaaagaaagagctgaaaatggagaaagcccaagagttagaacagttggatacaggagaagaaacagcggctccactacagacccagccccaggttcaatgtcctccgaagaatgaagtctttccctggtgatggtcccctgccctgtctttccagcatccactctcccttgtcctcctgggggcatatctcagtcaggcagcggcttcctgatgatggtcattggggtggttgtcatgtgatgggtcccctccaggttactaaagggtgcatgtcccctgcttgaacactgaagggcaggtggtgggccatggccatggtccccagctgaggagcaggtgtccctgagaacccaaacttcccagagagtatgtgagaaccaaccaatgaaaacagtcccatcgctcttacccggtaagtaaacagtcagaaaattagcatgaaagcagtttagcattgggaggaagctcagatctctagagctgtcttgtcgccgcccaggattgacctgtgtgtaagtcccaataaactcacctactcatcaagctggaaaaaaaaaaaaaaaaaaaaaaa

SEQ ID NO: 754 - DNA, 4045 bp, HOMO SAPIENS; identical to SEQ ID NO: 143

SEQ ID NO: 755 - DNA, 4688 bp, HOMO SAPIENS
gtccggggtctccagtagggctgacgctccggtgctcgcacaatcccccgcctcggctggcaacgggcgtccctccactccccgagtccccggcagccgccgccaccccagcgcgccccgatctggccccctgccccgcgaagatggctgccgtacgccgggcccgcagttattgccgctgcctggtgcgcttctccgaccgagaactctgctaagctccgctgcagagacaggcaggagtagacacccggacacccagcacccctcctccggggggcggtgcagagggggcacggagagcccctcgagcgcagcaggccgccccgccagcatggcagaagctgaggaagattgtcattctgatactgtcagagcagatgatgatgaagaaaatgaaagtcctgctgaaacagatctgcaggcacaactccagatgttccgagctcagtggatgtttgaacttgctccaggtgtaagctctagcaatttagaaaatcgaccttgcagagcagcaagaggctctctccagaaaacatcggcagataccaaaggaaaacaagaacaggcaaaagaagaaaaggctcgagaactcttcctaaaagcagtagaagaagaacaaaatggagctctctatgaagccatcaagttttatcgtagggctatgcaacttgtacctgatatagagttcaagattacttatacccggtctccagatggtgatggcgttggaaacagctacattgaagataatgatgatgacagcaaaatggcagatctcttgtcctacttccagcagcaactcacatttcaggagtctgtgcttaaactgtgtcagcctgagcttgagagcagtcagattcacatatcagtgctgccaatggaggtcctgatgtacatcttccgatgggtggtgtctagtgacttggacctcagatcattggagcagttgtcgctggtgtgcagaggattctacatctgtgccagagaccctgaaatatggcgtctggcctgcttgaaagtttggggcagaagctgtattaaacttgttccgtacacgtcctggagagagatgtttttagaacggcctcgtgttcggtttgatggcgtgtatatcagtaaaaccacatatattcgtcaaggggaacagtctcttgatggtttctatagagcctggcaccaagtggaatattacaggtacataagattctttcctgatggccatgtgatgatgttgacaacccctgaagagcctcagtccattgttccacgtttaagaactaggaataccaggactgatgcaattctactgggtcactatcgcttgtcacaagacacagacaatcagaccaaagtatttgctgtaataactaagaaaaaagaagaaaaaccacttgactataaatacagatattttcgtcgtgtccctgtacaagaagcagatcagagttttcatgtggggctacagctatgttccagtggtcaccagaggttcaacaaactcatctggatacatcattcttgtcacattacttacaaatcaactggtgagactgcagtcagtgcttttgagattgacaagatgtacacccccttgttcttcgccagagtaaggagctacacagctttctcagaaaggcctctgtagagcctcaagtccagtcctctatcacttttgcatgaattaaagtatatagcgcaaaagagcacctaagttataaatgtgtgtgtgtgcgtgtgtgtgtatatatatatatatatatatatatatatatatatatatatatatatatggaattggaacttattttaaattgttggagttcttttaagaagaatataaattgattattttttttatttaaagggatagttgattcctggggtgttttgaaattaagttggaattaagttgcttaagcatatttatgttgtgagaaaccttaatatgaggtttatcatgccctttttcaagcagatttatgagcagatttctgtcacataagtcgtcttctgcttgagtatcctaatatttcaatgcatcaggggagcgctccactggataagcattttatttcccgcatggcataatgtttttgcactaaaggctcaaagtgtgagaacctgttctggatttgtttgaaattatttcaccaataaagatcataaataaatgtttctttcaagaaaatatatttggatggcctttttaaagtaacaggatatttaataagagtcctagatagccagcggagactttaagaatcattgcctctagctgggtgtggtggcatgcacctgtagtcccagctatttgggaggctgatgcaggagaatagcttaagcccaggaatttgagtctgggagtttgagtccagcatgggcaacataacaagaccccatcccttattaaaagaaaaaaaaataattcctcatttcatcattggtctttatatgtagccacaaacactgacctcatgtaggcaccttaccaatatatgacattaagtgagagtgaatcccttaggactggaacacttcaagctcaaccaactgactcagttgtcattcttcacaaaagaatagtagaggatcatgtaaacctgagcctaactcttgttccagtatgaaagttgggggagagcaccagccacctaggaaaactgtatgttacctttttactcaaaggagtcccccctgcccagtaacagtcctattagtgtttaatttcagagtttgtgtctggtagacctctacctgattcagatttggttttgttgtttcaaccatagttagagacaaattctcatgtactttcagaaatcaatatctgcagccactgttacttttaattgacattaagagacacttcataggttcccacaattcagtatgggataggctttttaaaaagcacatacagaccaggcgtggtggctcatgcctataatcccagcactttgggaggctaagacaggcagatcacctgagctcaggagtccaagaccagcctgggcaacatggcaaaacaccgtctctacaaaaaaaaaaaaaaaaaaaattagccaagtacagtggggcacacctatagtcgcagctacttgggaggctggggcaggagaattgcctgagcctgggaagtggaagttgcagtgagccaagatcgtgccattccactccagcctgagcaacacagtgagaccctatctcaaaaaaataatgatgatagtacacgttatgttaaaggtgaaatgtgcatacagaaggaagagagttggccaggtgtggtgactcacacctataatcccaatactttgggaggccaaggcaggaggattgcttgaggtcaggagttttagaccagcctggacaacatagcaagacctcatctcttctaaaaattaaaaaaaaaaaaaataggcatggtggtacacacctgtggtcccagctagttgggaggctaaggcaggaggatcacttagccaggaggctgaggctacagtgagccaagattgcaccactgtgctccagcctgggtgagaaagcgagaccctgtctcaaaaaagaaaaaaaagagaggttggccttttgtagcaatctgagaagtgtgtttttcaagttggaaaggaaggagaaaagcaacttgcctaagataaggtagctcttcatgatatgactgttatttctgatatacaaataaatagaacatgattaggacatagtcaaatatagctagaaaaatatattcctaaggaaagtgagatttgaggagtccctgttgttctgcaacatccctagattgaatgatctgttgcagatggtggataccaagttcaaatttaaagatttctttgtaagcagtaaagtgactttcacttatttaacttagaactggaaaaagtaacttttttccagattacattttctgtatatttgtaaaatgcaaaagcaatatatatttgttgtgagaaaattagaatatacagataaaataaaatttaaaaaaacacccaaagataaccagaagaaaatttttgctatgtaacctttttcttctggtctttgcaaatcctgccgtagaaactttttaacttcaggagtgtccttcctttgctctattaggacattacagaaaccaatactatgaaaagctgacagcagtatctggattaactttttaaaaacaatgaaagcattttacagaaattacatttcagatcgtgctggaactgtgttcagaagatatcctcagagggaatctggcctgagcaccatcatgtttaattgcctcctcctgtcttgcattttcctcccagcccccttcctaccccttagcagagggccaggtgagggtgcttggggcccatgggggctgggagtgtagacttcagttacacccccagcccccaggggaaagcattagccttgaatcctcaatcccaggccctctactaaccactctcaacctatggtatttatcttttgattattctgtgcatctataaaaatgggattatattgtacagaatgctttgtaagctttctctccccacataagaatgccctgtaagcattttgttaaatatttttaatgactttagagtccaactttatactcctctttacgcattttggttttctaatttaatggtagtgtaaacgtttttggaataaacattcctgtggctaaa

SEQ ID NO: 756 - DNA, 2458 bp, HOMO SAPIENS
acggacctgcgctggaggcttcatctttgccgccgctgccgtcgccttcctgggattggagtctcgagctttcttcgttcgttcgtcggcgggttcgcgcccttctcgcgcctcggggctgcgaggctggggaaggggttggagggggctgttgatcgccgcgtttaagttgcgctcggggcggccatgtcggccggcgaggtcgagcgcctagtgtcggagctgagcggcgggaccggaggggatgaggaggaagagtggctctatggcggcccatgggacgtgcatgtgcacagtgatttggcaaaggacctagatgaaaatgaagttgaaaggccagaagaagaaaatgccagtgctaatcctccatctggaattgaagatgaaactgctgaaaatggtgtaccaaaaccgaaagtgactgagaccgaagatgatagtgatagtgacagcgatgatgatgaagatgatgttcatgtcactataggagacattaaaacgggagcaccacagtatgggagttatggtacagcacctgtaaatcttaacatcaagacagggggaagagtttatggaactacagggacaaaagtcaaaggagtagaccttgatgcacctggaagcattaatggagttccactcttagaggtagatttggattcttttgaagataaaccatggcgtaaacctggtgctgatctttctgattattttaattatgggtttaatgaagatacctggaaagcttactgtgaaaaacaaaagaggatacgaatgggacttgaagttataccagtaacctctactacaaataaaattacggccgaagactgtactatggaagttacaccaggtgcagagatccaagatggcagattcaatctttttaaggtacagcagggaagaactggaaactcagagaaagaaactgcccttccatctacaaaagctgagtttacttctcctccttctttgttcaagactgggcttccaccgagcagaaacagcacttcttctcagtctcagacaagtactgcctccagaaaagccaattcaagcgttgggaagtggcaggatcgatatgggagggccgaatcacctgatctaaggagattacctggggcaattgatgttatcggtcagactataactatcagccgagtagaaggcaggcgacgggcaaatgagaacagcaacatacaggtcctttctgaaagatctgctactgaagtagacaacaattttagcaaaccacctccgtttttccctccaggagctcctcccactcaccttccacctcctccatttcttccacctcctccgactgtcagcactgctccacctctgattccaccaccgggttttcctcctccaccaggcgctccacctccatctcttataccaacaatagaaagtggacattcctctggttatgatagtcgttctgcacgtgcatttccatatggcaatgttgcctttccccatcttcctggttctgctccttcgtggcctagtcttgtggacaccagcaagcagtgggactattatgccagaagagagaaagaccgagatagagagagagacagagacagagagcgagaccgtgatcgggacagagaaagagaacgcaccagagagagagagagggagcgtgatcacagtcctacaccaagtgttttcaacagcgatgaagaacgatacagatacagggaatatgcagaaagaggttatgagcgtcacagagcaagtcgagaaaaagaagaacgacatagagaaagacgacacagggagaaagaggaaaccagacataagtcttctcgaagtaatagtagacgtcgccatgaaagtgaagaaggagatagtcacaggagacacaaacacaaaaaatctaaaagaagcaaagaaggaaaagaagcgggcagtgagcctgcccctgaacaggagagcaccgaagctacacctgcagaataggcatggttttggccttttgtgtatattagtaccagaagtagatactataaatcttgttatttttctggataatgtttaagaaatttaccttaaatcttgttctgtttgttagtatgaaaagttaactttttttccaaaataaaagagtgaatttttcatgttaagttaaaaatctttgtcttgtactatttcaaaaataaaaagacagcaatgactttatatccaagaaaggaatgtgaatgagtcacttaacagggaatctaaagagctgtgttagctgtgtacatacacagattatctgagaaaaggtcaagggttccacttgggccacagtttttttgttaatcaaacaccactctcttaagaggctgcatcacaaaaggcaacaaagggcccctctaaggcttgagattaaaactagtctttatcattactgctgtgacactcttgcttagtatattaagagactcatacatttttgatatca

SEQ ID NO: 757 - DNA, 13671 bp, HOMO SAPIENS
atgaaagtagacaggactaaactgaagaagacacctactgaggctcctgcagactgcagagccttaatagacaaactcaaagtttgtaatgatgagcaacttctcttggaactgcagcagatcaaaacatggaacattggaaagtgcgagttatatcactgggtggacctgttggaccgcttcgatggaatactggcagatgctggacagacagtggagaatatgtcatggatgctcgtatgtgataggccagaaagagagcaactgaaaatgcttctcttggctgtgttgaacttcacagccttgctcattgagtacagcttttcccggcatctgtacagttccatagagcatttgacaactttattggcttcctctgatatgcaagtggtgctggcagtcctcaatctcctatatgtatttagcaaaagatcaaactacatcactcgtctgggatctgacaagaggaccccgctgctaactcggctacaacatttggcagagagctggggtggaaaggagaatggctttggacttgcagaatgttgcagagacttgcatatgatgaaatatccacccagtgcaactacactacactttgaattctatgcagatcctggggccgaggtcaaaattgagaaaaggacaactagtaacacactacattatattcacatagagcaacttgacaagatttcagaaagcccttctgaaatcatggaatctcttaccaaaatgtacagcattcctaaggataagcagatgctgttatttacacacatacgactggcccatggcttttctaatcacaggaagcgattgcaggcagttcaggccagactgcatgcaatatctatattagtgtattccaatgccttgcaggaatcagcaaacagtatcttgtataatggcttgatagaggagttggtagatgtccttcagataacggataagcagcttatggagattaaagcagcttctttacgaacattaacatcaattgtccacttggagagaactcccaaactcagcagtattattgactgtactggaactgcctcctaccatggatttttgccagtgcttgtaaggaactgtatccaggccatgattgatccttccatggatccataccctcaccagtttgccactgctctcttctcttttttataccatctggccagctacgatgctggtggtgaagccttggtctcctgtggaatgatggaagccttattgaaggtcataaagtttcttggcgatgaacaggaccagataacatttgtcaccagagccgtcagagtggttgaccttatcaccaacctggatatggcagcttttcaatcccatagtggactttctatcttcatttatagacttgagcatgaagtagatttgtgccgaaaagaatgtccgtttgtgatcaagccaaagatccagagacccaatactacacaagaaggagaggaaatggaaactgatatggatggagtccagtgtattccacaacgagcagcacttctgaaatccatgttgaatttcctcaagaaggccatccaagaccctgctttctcagatggcatacgacatgtgatggatggttctctgcctacctccctgaaacacatcatcagcaatgcagaatactatggcccatcactcttcctcctagctactgaagtggtgactgtgtttgtatttcaagaaccatcactgctctcctcactccaggacaatggattgacagatgtcatgctgcatgcactgcttatcaaagatgttcctgctacccgtgaagtccttggctccctcccaaatgtattcagtgcactctgtttgaatgcccgaggtcttcagtcttttgttcagtgtcagccttttgaacgcctcttcaaagttcttctgtctccagattacctcccagccatgcggaggaggagaagttctgatccccttggggatactgcatccaacctggggagtgctgtcgatgagctcatgagacatcagcccacccttaaaacagatgcaacgactgccatcatcaagttacttgaagaaatctgtaatcttggaagggaccccaaatacatctgtcagaagccatcaatccagaaggcagatggcactgccactgctcctcccccaaggtctaatcatgccgcagaagaagcctctagtgaggatgaggaggaagaggaagtacaggccatgcagagctttaattctacccagcaaaatgaaactgagcctaatcagcaggttgttggtacagaggaacgtattcctattcccctcatggattacatccttaatgtgatgaaatttgtggaatctattctgagcaacaatacaacagatgaccactgccaggaatttgtgaatcagaaaggactgttgcctttggttaccattttgggtcttcccaatctgcccattgactttcccacatctgctgcctgtcaggctgttgcaggtgtctgcaaatccatattgacactgtcacatgaacccaaagtccttcaagagggtctccttcagttggactccatcctctcctccctggagcccttacaccgccccattgaatcccctgggggctcagtgttgttgcgagaactggcttgcgcaggcaatgttgctgatgctaccctctcagcccaggccacacctctgctgcatgcactcactgctgcccatgcctacatcatgatgtttgttcatacttgcagagttggacagagtgaaattcgttccatctccgtaaaccagtggggctctcaattgggtctgagtgttttgagcaagctgagccagttatactgttccctggtgtgggaaagcactgtcctcctctctctgtgtaccccaaacagcctaccatctgggtgtgaatttggccaggcagatatgcagaaactggttccaaaggatgagaaggcaggtacgacccagggcggaaaaagatcagatggggaacaggatggagcagctggaagtatggatgcttctacccagggcttattagaaggcattgggctagatggtgacacattggctcccatggagacagatgaacctactgcttcagactctaagggcaaatctaaaatcacaccagcaatggctgccagaattaagcaaatcaagcctttgttatcagcttcctccagattaggccgagcacttgctgagctatttggacttcttgttaaactttgtgtgggatctcctgtccgccagagaaggagccatcatgctgccagcaccactacagcaccgacacctgccgcgcgatcaacagcctcagctctcactaagctcttgactaaggggttatcttggcagcccccaccatatacacctactccccgattcaggctgacattcttcatctgttcagttggtttcacatccccaatgctgtttgatgagaggaagtatccctaccacctcatgctgcaaaaatttctctgctccggaggccacaatgctctttttgaaactttcaactgggctctgtccatgggaggtaaagttcctgtttctgagggattggaacactcagacttgcctgatggcacaggagaattcctagatgcctggcttatgctggtggagaagatggtgaatcccaccacggtgcttgaatctccacattcgctgcctgccaaattgcctggaggtgtccagaactttccccagttcagtgcactgcgcttccttgtggtaactcagaaagcagcctttacttgcatcaaaaacttatggaaccggaaacccctgaaggtatatggtggacgaatggctgaatcgatgctggccattctatgccacatcctccgaggagaacctgtgattcgagagagactaagcaaggagaaggaggggtctcgaggagaagaggatacagggcaagaggaaggtggctcccgccgggaacctcaagtcaaccagcaacaactgcaacagctcatggacatgggcttcacaagggaacatgcaatggaggcactgttgaacaccagcaccatggagcaggccacagagtaccttttaacccaccctcctccaatcatgggaggagttgttcgggatctcagcatgtctgaagaggaccagatgatgagagcaattgctatgtctctgggacaggatattccaatggatcaaagggcagagtcacctgaggaagttgcttgccggaaggaggaagaggaacggaaagctcgggaaaagcaggaggaggaagaggctaaatgtctagagaagttccaggatgctgacccgttggaacaagatgagctccacactttcacagatactatgttgccaggctgcttccaccttcttgatgagctgccagacacagtataccgtgtgtgtgacctgatcatgacagcaatcaaacgtaatggagcagattatcgtgacatgattctgaagcaagtagtcaatcaggtgtgggaagctgctgatgtattgatcaaagctgctcttcccctgacaacaagtgacacaaaaaccgtgtcagagtggataagtcagatggccacactgccccaggcctccaatttggctactagaatcttgcttttaacgctactttttgaggagttgaagctaccttgtgcttgggtggttgaatcaagtggcatccttaatgtcctaatcaaactcttggaagtggttcagccctgcctccaggcagccaaggagcagaaggaagtccagaccccaaagtggatcacaccagtgttgctcctgattgatttctatgaaaagacagccatctcctcaaaaaggagagcccagatgactaagtacctgcaatccaacagcaacaactggcgctggtttgatgatcgctctgggcgttggtgtagttacagtgcaagcaacaatagcactattgattctgcctggaaatctggagagacaagcgtgcgattcactgcaggccgaagaagatacacggtccaattcactacaatggtgcaggttaatgaggaaacagggaaccgacgccctgtgatgctgactctcctcagggtacctcggctgaataaaaattcaaaaaacagcaatggacaggaactagagaagacgctggaagaaagcaaagaaatggatatcaaacgtaaagaaaataaaggcaatgatacccctttggccctagagagtacaaacactgaaaaggagacaagcctggaggaaacaaaaatcggggagatcctgatccagggcttgacagaagatatggtgactgttttaatccgggcctgcgtgagcatgctgggagtccctgtggacccagatactttgcatgccacccttcgtctctgtctgaggctcacccgggaccacaaatatgccatgatgtttgcagaactgaagagtacccgcatgatcttgaatttgacccagagctcaggcttcaatgggtttactcccctggtcacccttctcttaagacacatcattgaggacccctgtacccttcgtcataccatggaaaaggttgttcgctcagcagctacaagtggagctggtagcactacctctggtgttgtgtctggcagcctcggctctcgggagatcaactacatccttcgtgtccttgggccagccgcatgccgcaatccagacatattcacagaagtggccaactgctgtatccgcatcgcccttcctgcccctcgaggctcaggaactgcttcagatgatgaatttgagaatcttagaattaaaggccctaatgctgtacagctggtgaagaccacccctttgaagccctcacctctgcctgtcatccctgatactatcaaggaagtgatctatgatatgctgaatgctctggctgcataccatgctccagaggaagcagataaatctgatcctaaacctggggttatgacccaagaggttggccagctcctgcaagacatgggtgatgatgtataccagcagtaccggtcacttacgcgtcagagcagtgactttgatacgcagtcaggtttttccattaatagtcaggtctttgctgcagatggtgcctccactgagacttccgcatctgggacctcccaaggagaggcttcaactccagaggagtctcgagatgggaagaaagataaagaaggggaccgggcctctgaggaaggcaaacagaaaggcaagggcagcaaacctttaatgcctacctccactatccttcgtcttctggcagagttggtgaggtcctatgttggtattgctaccctgattgccaactacagctacactgtgggccagtctgaactgatcaaagaggactgcagtgtgctagcttttgttctggaccacctgctcccacatacccagaatgcagaagacaaggacacccctgccttggcccgcctgttcctcgcaagcctggctgctgcagggagtggcacagatgcccaggtggccctagtgaatgaagtaaaagcagcccttggacgggcactggctatggctgagagtacagagaaacatgccaggcttcaggcagtgatgtgtatcatcagtactatcatggagtcctgcccctccacctccagcttctacagcagtgccacagcgaagacccagcacaatggcatgaacaacatcattcggcttttcctgaagaagggactggttaatgacctggccagagtacctcacagcttagacctgtccagtcccaacatggccaacacagtcaatgctgctctgaagcctttggaaacactttcccggattgtgaaccagcccagtagcctttttggcagcaagagtgcttctagcaagaacaagtctgagcaggatgcccaaggagcctctcaagattccagtagcaaccagcaggacccaggcgagcctggggaagcagaagtgcaggaggaggatcatgatgtcactcagacagaggtggcagatggggatatcatggatggggaggctgaaaccgactcagtggtgattgctgggcagcctgaggtgctcagttcacaagagatgcaggttgagaatgagctggaggacctgatagatgagttgcttgagagggatggcggatctgggaacagtacaattatagtgagcagaagtggagaggatgaatcacaagaggacgtgctgatggatgaagctccttccaacctcagccaagcttccaccttgcaggccaaccgagaagattccatgaatatcctggaccctgaggatgaggaggagcacactcaggaagaggacagcagtggcagtaacgaggatgaggatgatagtcaggatgaagaggaggaggaggaggaagatgaggaagatgatcaggaggatgatgaaggtgaagagggagatgaagacgatgacgacgatggctctgagatggaattggatgaggattatcctgatatgaacgcttctcccttggtccgatttgagcgctttgaccgggaggatgatctcatcattgagtttgacaacatgttctccagtgctacagacatccccccatccccaggaaatatccctaccacccatccactgatggtgcgccatgcagaccacagttctctgacactgggcagtggctcttcaacaactcgtctcacccagggcatcgggcgcagtcagaggaccctaaggcagctgacggccaatactggccacaccattcatgttcactaccctgggaatcgccagcccaaccctcctcttatactgcagaggttgcttggtccctcagctgctgctgacatccttcagctgagcagcagccttcccctacaaagccggggtcgggcccgcctcctggtaggcaacgatgacgtccacatcatcgcccgttctgatgatgagctgctggatgactttttccatgatcagagcacagctaccagccaagcaggaaccctgtccagcatccccacagccctgacccgctggacagaagaatgcaaagttctcgatgctgagagcatgcatgactgtgtttcagtggttaaagtgtccattgtcaatcacctggaattcctgagggatgaggagctggaagaaaggcgagagaagcgcaggaaacaactggctgaggaagaaacaaagataactgataaaggcaaagaagataaggagaacagggatcagagtgcacagtgtactgcatctaagtcaaatgactccactgaacagaatctctcagatgggacgcctatgcctgacagctacccaacaaccccatcttcaactgatgcagctacatctgagtccaaggagacccttggcactctgcaatcctcacaacagcaaccaacactcccaaccccaccagctttgggagaggttcctcaggagctgcagtctccagctggagaagggggcagctctacacagctattgatgcctgtagagccagaggaattgggtcccacaaggccaagtggggaagcagaaacaactcagatggagttatccccagctcccactataacctcactttccccagagagagctgaggattctgatgcactgacggctgtcagcagtcagctagaaggctctcctatggatacaagcagcctggcttcctgtaccttagaggaggctgtgggtgacacttcagcagctggcagttctgagcagcccagagcaggcagctccactcctggggatgccccaccagctgtggcggaagtgcaaggcaggagtgatgggtcaggggaatctgcccagccacctgaggacagctccccacctgcatcctctgagagctcttccaccagagattctgccgtggccatttctggagcagattcccgaggaatcctagaagagccgttgccttcaacaagcagtgaagaagaagatccccttgcgggtatcagtctccctgaaggtgtggacccctcttttctggctgccctgcctgatgacatccgtcgggaagttctacagaaccagctaggcattcgtccaccaacccggactgccccctccacaaatagctcagcgcctgcagtggtggggaatcctggtgtgactgaagtgagccctgagtttctggctgccctgcctccagccattcaggaggaagtactggcacagcagagagctgagcagcagcgacgagaactagcacagaatgccagctcagacacccctatggaccctgtgaccttcatccagactctgccctcagacctgcgccgtagtgtcctagaggatatggaggacagtgtgttagctgtgatgccacctgacattgcagctgaggctcaagccctgagacgagagcaagaagcccggcagcgacagctcatgcatgagcgtctgtttgggcacagtagcacctccgcactctctgctattctccgaagcccggctttcaccagtcgcttaagtggcaaccgtggggtccagtatactcgccttgctgtgcagagaggtggcaccttccagatggggggtagcagcagccataacaggccttctggcagtaatgtagatactctcctccgcctccgaggacggctccttctggaccacgaagccctttcttgtctcttggtcctactttttgtggatgagccaaagctcaatactagccgtctacaccgagtactgagaaatctctgctaccatgcccagacccgccactgggtcatccgcagtctgctctccatcttgcagcgcagcagtgagagtgagctatgcattgaaacacccaaactcactacaagtgaggaaaagggcaaaaagtcgagcaagagctgtgggtcaagtagccatgagaaccgtcccctggacctgctacacaagatggagtcaaagagctccaaccagctttcctggctctcagtatccatggatgcagccctaggctgcaggactaatatatttcagatccagcgttcaggggggcgtaaacataccgagaagcatgcaagcggtggctccaccgtccacatccatccccaagctgctcctgttgtctgcagacacgttttggatacactcattcaattggccaaggtatttcccagccacttcacacagcagcggaccaaagaaacaaactgtgagagtgatcgggaaaggggcaataaggcctgtagcccatgctcctcacagtcctccagcagtggcatttgcacagacttctgggacttattggtaaaactggacaacatgaatgtcagccggaaaggcaagaactccgtgaagtcagtgccagtgagcgctggcggtgagggggaaacctctccatacagcctcgaggcctctccactggggcagctcatgaacatgttgtcacacccagtcatccgccggagctctctcttaactgagaaactcctcagactcctttctctcatctcaattgctctcccagaaaacaaggtgtcagaagcacaggctaattctggcagcggtgcttcctccaccaccactgccacctcaaccacatctaccaccaccaccactgccgcctccaccacgcccacaccccctactgcacccacccctgtcacttctgctccagccctggttgctgccacggctatttccaccattgtcgtagctgcttcgaccacagtgactacccccacgactgctaccactactgtttcaatttctcccactactaagggcagcaaatctccagcgaaggtgagtgatgggggcagcagcagtacagactttaagatggtgtcctctggcctcactgaaaaccagctacagctctctgtagaggtgttgacatcccactcttgttctgaggaaggcttagaggatgcagccaacgtactactgcagctctcccggggggactctgggacccgggacactgttctcaagctgctactgaatggagcccgccatctgggttataccctttgtaaacaaataggtaccctgctggccgagctgcgggaatacaacctcgagcagcagcggcgagcccaatgtgaaaccctctctcctgatggcctgcctgaggagcagccacagaccaccaagctgaagggcaaaatgcagagcaggtttgacatggctgagaatgtggtaattgtggcatctcagaagcgacctttgggtggccgggagctccagctgccttctatgtccatgttgacatccaagacatctacccagaagttcttcttgagggtactacaggtcatcatccagctccgggacgacacgcgccgggctaacaagaaagccaagcagacaggcaggctaggttcctccggtttaggctcagctagcagcatccaggcagctgttcggcagctggaggctgaggctgatgccattatacaaatggtacgtgagggtcaaagggcgcggagacagcaacaagcagcaacgtcggagtctagccagtcagaggcgtctgtccggagggaggaatcacccatggatgtggaccagccatctcccagtgctcaagatactcaatccattgcctccgatggaaccccacagggggagaaggaaaaggaagaaagaccacctgagttacccctgctcagcgagcagctgagtttggacgagctgtgggacatgcttggggagtgtctaaaggaactagaggaatcccatgaccagcatgcggtgctagtgctacagcctgctgtcgaggccttctttctggtccatgccacagagcgggagagcaagcctcctgtccgagacacccgtgagagccagctggcacacatcaaggacgagcctcctccactctcccctgcccccttaaccccagccacgccttcctcccttgacccattcttctcccgggagccctcatctatgcacatctcctcaagcctgccccctgacacacagaagttccttcgctttgcagagactcaccgcactgtgttaaaccagatcctacggcagtccacgacccaccttgctgatgggccttttgctgtcctggtagactacattcgtgtcctcgactttgatgtcaagcgcaaatatttccgccaagagctggagcgtttagatgaggggctccggaaagaagacatggctgtgcatgtccgtcgtgaccatgtgtttgaagactcctatcgtgagctgcatcgcaaatcccccgaagaaatgaagaatcgattgtatatagtatttgaaggagaagaagggcaggatgctggcgggctcctgcgggagtggtatatgatcatctctcgagagatgtttaaccctatgtatgccttgttccgtacctcacctggtgatcgagtcacctacaccatcaatccatcttcccactgcaaccccaaccacctcagctacttcaagtttgtcggacgcattgtggccaaagctgtatatgacaaccgtcttctggagtgctactttactcgatccttttacaaacacatcttgggcaagtcagtcagatatacagatatggagagtgaagattaccacttctaccaaggtctggtttatctgctggaaaatgatgtctccacactaggctatgacctcaccttcagcactgaggtccaagagtttggagtttgtgaagttcgtgacctcaaacccaatggggccaacatcttggtaacagaggagaataagaaggagtatgtacacctggtatgccagatgagaatgacaggagccatccgcaagcagttggcggctttcttagaaggcttctatgagatcattccaaagcgcctcatttccatcttcactgagcaggagttagagctgcttatatcaggactgcccaccattgacatcgatgatctgaaatccaacactgaataccacaagtaccagtccaactctattcagatccagtggttctggagagcattgcgttctttcgatcaagctgaccgtgccaagttcctccagtttgtcacgggtacttccaaggtacccctgcaaggctttgctgccctcgaaggcatgaatggcattcagaagtttcagatccatcgagatgacaggtccacagatcgcctgccttcagctcacacatgttttaatcagctggatctgcctgcctatgagagctttgagaagctccgccacatgctactgttggctatccaggagtgctctgaaggctttgggctggcctaataaggccctgcccaactccgtggggttttttttaccattgttggacctggggaggggggagttaaaaaaagaaccagaaagaaattgtcaaaaaccaataaatgaaatccaccaactcaccgtgtgtgtcccagctgccccatcttccccagcgcatacctgttcctcttctcattctctccccgccgcctgtttcctcaccttctctcccctttccatgccgtccatgatccccaccccatgtgttttaaaaaggcagtagcctttgcagggacctgtctgtcccaactgtttgaacagtgtgctcctcagattctgtgttcagaaggatttgctgcattgagacttgaaacctttggataggggaaaaaattatatatatatatatttttttgttctgtttgcatttcttaatttgtgcttggaatgtgttgatgtgcacagctaatgattcaatgcgagacaagattggcgtctgtgttgtggaggtttcaaataaagagcactcttcataactcaaaaaaaaaaaaaaaaaaaaaaaaaaaa

SEQ ID NO: 758 - DNA, 2850 bp, HOMO SAPIENS
gcatgtagcttctgcagttgctcctcctcaccctccgcgacctgatttcctagaagggctctgtcacccgaaaagattttccactggcttagaggagggagggcccgccttcccccgttatccattggctgctcgttccgccgcaagttgggggcggggttagggcgcctttcgattgcatcagctggtccagccgaggccaagtcccgggcgctagcccacctcccacccgcctcttggctcctctcctctaggccgtcgctttcgggttctctcatcgcttcgtcgttcgccaatgtttgaggagaaggccagcagtccttcagggaagatgggaggcgaggagaagccgattggtgctggtgaagagaagcaaaaggaaggaggcaaaaagaagaacaaagaaggatctggagatggaggtcgagctgagttgaatccttggcctgaatatatttacacacgtcttgagatgtataatatactaaaagcagaacatgattccattctggcagaaaaggcagaaaaagatagcaagccaattaaagtcactttgcctgatggtaaacaggttgatgcggaatcttggaaaactacaccatatcaaattgcctgtggaattagtcaaggcctggccgacaacaccgttattgctaaagtaaataatgttgtgtgggacctggaccgccctctggaagaagattgtaccttggagcttctcaagtttgaggatgaggaagctcaggcagtgtattggcactctagtgctcacataatgggtgaagccatggaaagagtctatggtggatgtttatgctacggtccgccaatagaaaatggattctattatgacatgtacctcgaagaagggggtgtgtctagcaatgatttctcttctctggaggctttgtgtaagaaaatcattaaagaaaaacaagcttttgaaagactggaagttaagaaagaaactttactggcaatgtttaagtacaacaagttcaaatgccggatattgaatgaaaaggtgaatactccaactaccacagtctatagatgtggccctttgatagatctctgccggggtcctcatgttagacacacgggcaaaattaaggctttaaaaatacacaaaaattcctccacgtactgggaaggcaaagcagatatggagactctccagagaatttatggcatttcattcccagatcctaaaatgttgaaagagtgggagaagttccaagaggaagctaaaaaccgagatcataggaaaattggcagggaccaagaactatatttctttcatgaactcagccctggaagttgcttttttctgccaaaaggagcctacatttataatgcacttattgaattcattaggagcgaatataggaaaagaggattccaggaggtagtcaccccaaacatcttcaacagccgactctggatgacctcgggccactggcagcactacagcgagaacatgttctcctttgaggtggagaaggagctgtttgccctgaaacccatgaactgcccaggacactgccttatgtttgatcatcggccaaggtcctggcgagaactgcctctgcggctagctgattttggggtacttcataggaacgagctgtctggagcactcacaggactcacccgggtacgaagattccaacaggatgatgctcacatattctgtgccatggagcagattgaagatgaaataaaaggttgtttggattttctacgtacggtatatagcgtatttggattttcttttaaactaaacctttctactcgcccggaaaaattccttggagatatcgaagtatgggatcaagctgagaaacaacttgaaaacagtctgaatgaatttggtgaaaagtgggagttaaactctggagatggagctttctatggcccaaagattgacatacagattaaagatgcgattgggcggtaccaccagtgtgcaaccatccagctggatttccagttgcccatcagatttaatcttacttatgtaagccatgatggtgatgataagaaaaggccagtgattgttcatcgagccatcttgggatcagtggaaagaatgattgctatcctcacagaaaactatgggggcaaatggcccttttggctgtcccctcgccaggtaatggtagttccagtgggaccaacctgtgatgaatatgcccaaaaggtacgacaacaattccacgatgccaaattcatggcagacattgatctggatccaggctgtacattgaataaaaagattcgaaatgcacagttagcacagtataacttcattttagttgttggtgaaaaagagaaaatcagtggcactgttaatatccgcacaagagacaataaggtccacggggaacgcaccatttctgaaactatcgagcggctacagcagctcaaagagttccgcagcaaacaggcagaagaagaattttaatgaaaaaattacccagattggctccatggaaaaggaggaacagcgtttccgtaaaattgactttgtactctgaaaacgtcaatttatattgaacttggaggagtttggcaaagtctgaataggtcaacctgcaggcgtaactatttttgacctagtcagtttttaaacaatgtgcatttgaaggagttaattaaaagagagccaataaaatgattttactcattcagtatctgagtactggaagtgaaacatgaggaatgctttagtgtaatgtgggagaacttttttgtaaatttaatgcaattgaaaaagttttcaaattcaattaagataactagaattggattatggtgtaaaaataaaaaaaaaatttattcacataa

SEQ ID NO: 759 - DNA, 1144 bp, HOMO SAPIENS
aacggtgcgctggagcgagtgagcagcgatacctagggcggaagtgctctcggcggaagtgatcgctgtgtgaatcgtgggtgggatggccgcgggccgcctctttctaagtcggcttcgagcacccttcagttccatggccaagagcccactcgagggcgtttcctcctccagaggcctgcacgcggggcgcgggccccgaaggctctccatcgaaggcaacattgctgtgggaaagtccacgtttgtgaagttactcacgaaaacttacccagaatggcacgtagctacagaacctgtagcaacatggcagaatatccaggctgctggcacccaaaaagcctgcactgcccaaagtcttggaaacttgctggatatgatgtaccgggagccagcacgatggtcctacacattccagacattttcctttttgagccgcctgaaagtacagctggagcccttccctgagaaactcttacaggccaggaagccagtacagatctttgagaggtctgtgtacagtgacaggtatatctttgcaaagaatctttttgaaaatggttccctcagtgacatcgagtggcatatctatcaggactggcattcttttctcctgtgggagtttgccagccggatcacattacatggcttcatctacctccaggcttctccccaggtttgtttgaagagactgtaccagagggccagggaggaggagaaaggaattgagctggcctatctagagcagctgcatggccaacacgaagcctggcttattcacaagacaacgaagctccactttgaggctctgatgaacattccagtgctggtgttggatgtcaatgatgatttttctgaggaagtaaccaaacaagaagacctcatgagagaggtaaacacctttgtaaagaatctgtaaccaataccatgaagttcaggctgtgatctgggctccctgactttctgaagctagaaaaatgttgtgtctcccaaccacctttccatccccagcccctctcatccctggagcactctgccgctcaagagctggtttgttaattattgttagactttgccattgttttcttttgtacctgaagcattttgaaaataaagtttacttaagttatgcttgtttttctaa

SEQ ID NO: 760 - DNA, 5780 bp, HOMO SAPIENS; identical to SEQ ID NO: 388

SEQ ID NO: 761 - DNA, 4451 bp, HOMO SAPIENS; identical to SEQ ID NO: 658

SEQ ID NO: 762 - DNA, 15882 bp, HOMO SAPIENS; identical to SEQ ID NO: 458

SEQ ID NO: 763 - DNA, 2554 bp, HOMO SAPIENS
ccccagggctgccaggcgtattcctgcctgggcctcctggcacaagagataaaatgaacagggttactcccagtaactggtccaggagataccagcagagagggagtaggagagaagaaacatgtcagggtgctcacaggagtagtggggggaggttttgctatttccagattcttaagccaacaaaagtgccttcatattttctgtctggaagacagaaagcccagaaggagcccagaagcaacagtttgagagaggcgctttctgcggccaagtggataagaggagcggcctgcaaccatgggacagggtgagccaagccagcgctcgacagggcttgctggactgtatgcagcccccgcagcatcacctgttttcattaaaggaagtgggatggatgccctgggtatcaagagctgtgactttcaggcagcaagaaacaatgaggagcaccacaccaaggccctcagctcccggcgcctctttgtgaggagggggcagcccttcaccatcatcctgtacttccgcgctccagtccgtgcatttctgcctgccctgaagaaggtggccctcactgcacaaactggagagcagccttccaagatcaacaggacccaagccacattcccaatttccagtctgggggaccgaaagtggtggagtgcagtggtggaggagagagatgcccagtcctggaccatctctgtgaccacacctgcggacgctgtcattggccactactcgcttctgctgcaggtctcaggcaggaagcaactcctcttgggtcagttcacactgctttttaacccctggaatagagaggatgctgtgttcctgaagaatgaggctcagcgcatggagtacttgttgaaccagaatggtctcatctacctgggtacagctgactgcatccaggcagagtcctgggactttggccagttcgagggggatgtcattgacctcagcctgcgcttgctgagcaaggacaagcaggtagagaagtggagccagccggtgcacgtggcccgtgtgttgggtgccttgctgcattttctcaaggagcagagggtcctgcccaccccgcagacccaggccacccaggaaggggccttgctgaacaagcgccggggcagcgtgcccatcctgcggcagtggctcaccggccgaggccgacctgtgtatgatggccaggcctgggtgttggctgctgttgcttgcacagtgctgcgatgcctgggaatccctgcccgcgtggtgaccacgtttgcctcagcacagggcaccggtgggcgtcttctcatagatgaatactataatgaggagggacttcagaacggagaaggccagagaggcagaatctggatcttccagacttccacagagtgctggatgacgcggcctgccttgccccagggttatgatggatggcagattctgcacccaagtgctcctaatggaggtggagtcctggggtcctgtgatctggtgccggtcagagcagtcaaggaggggacgctggggctgaccccagcagtgtcagacctttttgctgccataaatgcctcatgtgtggtctggaagtgctgtgaggatgggacactggagttgactgactccaacacaaagtatgttggcaacaacatcagcaccaagggtgtgggcagtgaccgctgcgaggacatcactcagaactacaagtatcctgaagggtctcttcaggaaaaagaggtgctggagagagtcgagaaagagaaaatggaacgtgagaaagacaacggcatccgtcctcccagtctcgagactgccagtcctctgtacctgctcttgaaagcacccagctccctacccctgagaggggatgcccagatctcagtgacgctggttaatcacagtgagcaggagaaggcagtgcagctggcaattggggtccaggctgtacactacaacggtgtccttgctgccaagctctggaggaagaagctgcacctcacgctcagtgccaacctggaaaagataataaccatcggcctgttcttctccaattttgagcgaaacccacccgagaacaccttccttagactcaccgccatggcaacacactctgaatccaaccttagctgctttgctcaggaagacattgccatttgtagaccacaccttgccatcaagatgccagagaaagcagagcagtatcaacccctcacagcctcagtcagcctccagaactccctagatgcccccatggaggactgtgtgatctccatcctgggaagggggctcattcacagagagaggagctacagattccgttcagtgtggcctgaaaacaccatgtgtgccaagttccagttcacgccaacacatgtggggctccagagactcactgtggaagtggactgcaacatgttccagaacctaaccaactataaaagcgtcaccgtggtagcccctgaactatcagcttaaacttccagctctatcaccactctcctgccaacccttgttctacaatctaaaccaaacatgtgctaggaagagaaaaaaaaaaaaaaaa

SEQ ID NO: 764 - DNA, 1256 bp, HOMO SAPIENS
acgaggggagctccggctgcgtcttcccgcagcgctacccgccatgcgcctgccgcgccgggccgcgctggggctcctgccgcttctgctgctgctgccgcccgcgccggaggccgccaagaagccgacgccctgccaccggtgccgggggctggtggacaagtttaaccaggggatggtggacaccgcaaagaagaactttggcggcgggaacacggcttgggaggaaaagacgctgtccaagtacgagtccagcgagattcgcctgctggagatcctggaggggctgtgcgagagcagcgacttcgaatgcaatcagatgctagaggcgcaggaggagcacctggaggcctggtggctgcagctgaagagcgaatatcctgacttattcgagtggttttgtgtgaagacactgaaagtgtgctgctctccaggaacctacggtcccgactgtctcgcatgccagggcggatcccagaggccctgcagcgggaatggccactgcagcggagatgggagcagacagggcgacgggtcctgccggtgccacatggggtaccagggcccgctgtgcactgactgcatggacggctacttcagctcgctccggaacgagacccacagcatctgcacagcctgtgacgagtcctgcaagacgtgctcgggcctgaccaacagagactgcggcgagtgtgaagtgggctgggtgctggacgagggcgcctgtgtggatgtggacgagtgtgcggccgagccgcctccctgcagcgctgcgcagttctgtaagaacgccaacggctcctacacgtgcgaagatgtggacgagtgctcactagcagaaaaaacctgtgtgaggaaaaacgaaaactgctacaatactccagggagctacgtctgtgtgtgtcctgacggcttcgaagaaacggaagatgcctgtgtgccgccggcagaggctgaagccacagaaggagaaagcccgacacagctgccctcccgcgaagacctgtaatgtgccggacttaccctttaaattattcagaaggatgtcccgtggaaaatgtggccctgaggatgccgtctcctgcagtggacagcggcggggagaggctgcctgctctctaacggttgattctcatttgtcccttaaacagctgcatttcttggttgttcttaaacagacttgtatattttgatacagttctttgtaataaaattgaccattgtaggtaatcaggaaaaaaaaaaaaaaaaaaaaa

SEQ ID NO: 765 - DNA, 4737 bp, HOMO SAPIENS
gtaaaactattccccgtgaaggcggcagggcagaggtccagggcgggctttgctgggagcctcgggaccccgggttgggggccgtggggcggcacctggcgagctggcgggtgggcggcgagccgaggcttcccggcctggcggcaactcgcccctctgccctcagccctcccggctccgctcccttcccccacgccgccctgcccctcccccacgcccctttctctttctttctttctttcccagttcgcttgcccccaccccagcggcgcccgccgggctcctcgcccaatggccgcggggcccgggaccgcatcagctgatcggcccgggctcctggccgctgggagccaatcagggcaccgggggcggccccgggccgcggataaagggtgcggggctgctggcggctctgcagagtcgagagtgggagaagagcggagcgtgtgagcagtactgcggcctcctctcctctcctaacctcgctctcgcggcctagctttacccgcccgcctgctcggcgaccagcggggatcctcccccagccgcaagtccacgaagaaagcaacgaatgaaaattatgaagacaacgagaagtcagactcctccgggtcgcgctccagctgcttcggcttcgtcgcctactctgtgaactccggggagagatctcgagtcaagattaagaccttaacccaccaacctgcctgttcggacaccccccgggccggccgctgtctgtccccttctccatcgccctctcccagaaagctccggtgcttggaccagctagagtctgagaaagaggagaggcgcgaacgccactccaaaaagagaagggttaaagagggcaaccctaacgatacgcttgactttctgtggctgggaacaccttccaccatgaccacctcagcaagttcccacttaaataaaggcatcaagcaggtgtacatgtccctgcctcagggtgagaaagtccaggccatgtatatctggatcgatggtactggagaaggactgcgctgcaagacccggaccctggacagtgagcccaagtgtgtggaagagttgcctgagtggaatttcgatggctctagtactttacagtctgagggttccaacagtgacatgtatctcgtgcctgctgccatgtttcgggaccccttccgtaaggaccctaacaagctggtgttatgtgaagttttcaagtacaatcgaaggcctgcagagaccaatttgaggcacacctgtaaacggataatggacatggtgagcaaccagcacccctggtttggcatggagcaggagtataccctcatggggacagatgggcacccctttggttggccttccaacggcttcccagggccccagggtccatattactgtggtgtgggagcagacagagcctatggcagggacatcgtggaggcccattaccgggcctgcttgtatgctggagtcaagattgcggggactaatgccgaggtcatgcctgcccagtgggaatttcagattggaccttgtgaaggaatcagcatgggagatcatctctgggtggcccgtttcatcttgcatcgtgtgtgtgaagactttggagtgatagcaacctttgatcctaagcccattcctgggaactggaatggtgcaggctgccataccaacttcagcaccaaggccatgcgggaggagaatggtctgaagtacatcgaggaggccattgagaaactaagcaagcggcaccagtaccacatccgtgcctatgatcccaagggaggcctggacaatgcccgacgtctaactggattccatgaaacctccaacatcaacgacttttctgctggtgtagccaatcgtagcgccagcatacgcattccccggactgttggccaggagaagaagggttactttgaagatcgtcgcccctctgccaactgcgaccccttttcggtgacagaagccctcatccgcacgtgtcttctcaatgaaaccggcgatgagcccttccagtacaaaaattaagtggactagacctccagctgttgagcccctcctagttcttcatcccactccaactcttccccctctcccagttgtcccgattgtaactcaaagggtggaatatcaaggtcgtttttttcattccatgtgcccagttaatcttgctttctttgtttggctgggatagaggggtcaagttattaatttcttcacacctaccctcctttttttccctatcactgaagctttttagtgcattagtggggaggagggtggggagacataaccactgcttccatttaatggggtgcacctgtccaataggcgtagctatccggacagagcacgtttgcagaagggggtctcttcttccaggtagctgaaaggggaagacctgacgtactctggttaggttaggacttgccctcgtggtggaaacttttcttaaaaagttataaccaacttttctattaaaagtgggaattaggagagaaggtaggggttgggaatcagagagaatggctttggtctcttgcttgtgggactagcctggcttgggactaaatgccctgctctgaacacgaagcttagtataaactgatggatatccctaccttgaaagaagaaaaggttcttactgcttggtccttgatttatcacacaaagcagaatagtatttttatatttaaatgtaaagacaaaaaactatatgtatggttttgtggattatgtgtgttttgctaaaggaaaaaaccatccaggtcacggggcaccaaatttgagacaaatagtcggattagaaataaagcatctcattttgagtagagagcaagggaagtggttcttagatggtgatctgggattaggccctcaagacccttttgggtttctgccctgcccaccctctggagaaggtgggcactggattagttaacagacaacacgttactagcagtcacttgatctccgtggctttggtttaaaagacacacttgtccacataggtttagagataagagttggctggtcaacttgagcatgttactgacagagggggtattggggttattttctggtaggaatagcatgtcactaaagcaggccttttgatattaaattttttaaaaagcaaaattatagaagtttagattttaatcaaatttgtagggtttctaggtaatttttacagaattgcttgtttgcttcaactgtctcctacctctgctcttggaggagatggggacagggctggagtcaaaacacttgtaattttgtatcttgatgtctttgttaagactgctgaagaattattttttttcttttataataaggaataaaccccacctttattccttcatttcatctaccattttctggttcttgtgttggctgtggcaggccagctgtggttttcttttgccatgacaacttctaattgccatgtacagtatgttcaaagtcaaataactcctcattgtaaacaaactgtgtaactgcccaaagcagcacttataaatcagcctaacataagatctctctgatgtgtttgtgattctttcaaatccctatgtgccattatatttctttatttcctaaaacaggcaaaataagctcaagtttatgtactctgagtttttaaaacactggagtgatgttgctgaccagccgtttcctgtacctctctaagttgggtatttgggacttaagggattaagtttttcacctagacttagttacacacaatcttggcatttcctagcctagaggtttgtagcagggtacaagccccactcctcccccttcctttgctcccctgagtttggttttggcttaccataacattgttttgaccattcctagcctaatacaatagcctaacataatgtaagattaactggctttacgatttctattctctgctctcagtgataagaaacaaatattagctaccctgctaccctggttgaagccttccaaggctggctatgccctaggcatgggctcatccttgggtgtatcttgccttgcaggaagaccagtggaccgattgtgattctcaaaagctctgtgttgtcacctgtgcccttgccccttgctcttatcttggtccgtgtatctgggagttcttccaccttatcttggccaattcctaccttcgttcattcctcatgaggttgggtaaaagctccctccggctcccatgatgctgtgcatatacctagcaaaaagcaattattggacacattggagtgcaatattattaatagcattaatactactaataatgtgggcaatagtgattgtttttaaaaggcagtatactcttaccagtgcgaggtagctggggcctgtgatagtttttagagataagttcttcaggcaactgtgtattttacactagtcaagtaatcctagatatccgtggtttttcttaagaaagttggctcgtaatatgatttaatattcaaagtagagtcatctacctattagcttgctggcgtggtcctagtttatgcctgtttcagcatgattgttgagtaccctgtttcatccttagcattttcttgattttgttgttaaatgatgtatacccttatttccattgaatctgtgcttccacccccccaactgaagttgtcttccctttgcttggccacccttacagcctcttggatggtgtatcctacagtgtaagcactaaactgaagaggcagtgacctgaaaaaaaaaaaaaaaaaa

SEQ ID NO: 766 - DNA, 3288 bp, HOMO SAPIENS
gctccctcccctcctagctggcttcggcggggacggcggcggcggcggcgggcggggagggcgtgcgccggccgagaggtgtcggcggcgaggcaaaggaagtttcaagtggaaggtcgtccgtcggccggcgcgtcctcctgctctcctccgcagcatcatggcggagccgagcggctcgcccgtgcacgtccagcttccccagcaggcggccccggtgacagcggcggcggcggcggccccggcggccgcgacagcagcgccggccccggcagctcccgcggccccggccccggccccggccccggcggcacaggctgtcggctggcccatctgcagggacgcgtacgagctgcaggaggttatcggcagtggagctactgctgtggttcaggcagccctatgcaaacccaggcaagaacgtgtagcaataaaacggatcaacttggaaaaatgccagaccagtatggatgaactattaaaagaaattcaagccatgagtcagtgcagccatcccaacgtagtgacctattacacctcttttgtggtcaaagatgaactttggctggtcatgaaattactaagtggaggttcaatgttggatatcataaaatacattgtcaaccgaggagaacacaagaatggagttctggaagaggcaataatagcaacaattcttaaagaggttttggaaggcttagactatctacacagaaacggtcagattcacagggatttgaaagctggtaatattcttctgggtgaggatggttcagtacaaatagcagattttggggtaagtgcgttcctagcaacagggggtgatgttacccgaaataaagtaagaaaaacattcgttggcaccccatgttggatggctcctgaagtcatggaacaggtgagaggctatgacttcaaggctgacatgtggagttttggaataactgccattgaattagcaacaggagcagcgccttatcacaaatatcctcccatgaaagtgttaatgttgactttgcaaaatgatccacccactttggaaacaggggtagaggataaagaaatgatgaaaaagtacggcaagtcctttagaaaattactttcactgtgtcttcagaaagatccttccaaaaggcccacagcagcagaacttttaaaatgcaaattcttccagaaagccaagaacagagagtacctgattgagaagctgcttacaagaacaccagacatagcccaaagagccaaaaaggtaagaagagttcctgggtcaagtggtcaccttcataaaaccgaagacggggactgggagtggagtgacgacgagatggatgagaagagcgaagaagggaaagcagctttttctcaggaaaagtcacgaagagtaaaagaagaaaatccagagattgcagtgagtgccagcaccatccccgaacaaatacagtccctctctgtgcacgactctcagggcccacccaatgctaatgaagactacagagaagcttcttcttgtgccgtgaacctcgttttgagattaagaaactccagaaaggaacttaatgacatacgatttgagtttactccaggaagagatacagcagatggtgtatctcaggagctcttctctgctggcttggtggatggtcacgatgtagttatagtggctgctaatttacagaagattgtagatgatcccaaagctttaaaaacattgacatttaagttggcttctggctgtgatgggtcggagattcctgatgaagtgaagctgattgggtttgctcagttgagtgtcagctgatgtatgtcccttgatgtcaccctgatctgtcatgccccaccgccacccctactcccttcaaccctccctctttctgcccatttcctcccaccccctcactcccatttcctagcaaaatcagaagattgtgaagaggccggcttcaacaaaatgggataaaaaaataattttttaaaacttacaacactccgagttctgctttattctctagcaatccacagtacaagaacaagcaaatgccacagctgcacgactgttgctcatttttccaaaagctatttaatattcttagcaatcaatttggatatcccttaagtgaaaagaatctgaaatacactcaggtggtcttatttattggcaacaaaaggaattttctatccagaagcctatttctcctttcattgttgttatttctgttataatactttaattgtacatctgacaatactgcctcttttatgttgtatttagaaattaatatacttataaaattaagatttattagccaaacttgaattctagttttaaaactgactgtgaattttatttttcatatatttatgcattacacaccttagctataagaaaaaaagggttttgattatatgcttcttgcagttaatctcgttatttaaacaaaaagttttgggtctgtctttggagtatttgtaacttctaaattttgaaatgactgaattaggaatttggatgcttattcttttagtctgtttgcctaaaaaccaatttacaatctgactgtctcttgggagagggaggtgccttgcaaactttcacattaagaatgtgcctgaggctgctttactctggaatagtctcagatctaaaatttcctctatataaggtggcatatgttaagttttgcttcattggaccgtttagaatgctatgtaaaatgttgccattctgttagattgctaactatatacccatctctgatttggctctccttaagtgataggatttgttattctaaaggtgataaacttgaaaatatcagaatctgagttttacttgaaattttgcagaatacccaggtggagtgaaaattggaagggttttgtgcaatgactaaaaggtaaaacgctgttaaggttcaagaatcaatactttcaacccaagtagccctctgcttgactgtatattatggaactagtaaaccttaggattttgaaaattggagtctaatctttcaaggaggtgggctcccaggatggtaccattgctctttcctagctaaccctagatatggcagctctttaatgtacttcaaaaagcaaatatatattactaaggaaaaaaagttatttataattgccttgtcataattgttaaggtgttctagagccatttgcatacaatttaatgtaatttcattccattctattgtttacacaacgattactcgaagatgactgcaaaggtaaaaggaaaataaaagtgtattgcacaatgagaaaaaaaaaaaaaaa

SEQ ID NO: 767 - DNA, 5648 bp, HOMO SAPIENS; identical to SEQ ID NO: 281

SEQ ID NO: 768 - DNA, 4209 bp, HOMO SAPIENS; identical to SEQ ID NO: 549

SEQ ID NO: 769 - DNA, 3739 bp, HOMO SAPIENS; identical to SEQ ID NO: 346

SEQ ID NO: 770 - DNA, 6443 bp, HOMO SAPIENS
cggacgagggccagagccatggcttggcagcgtccagggccagaggagccttctggagcatcacccaggaaaaaaacagatgggctacatgggagaaatggaggtgcaaggtcccaccagggagagtggacagtccctcccgcctcagaagaaagcctacctttcccacctcagtacaggcagtggacacatcgagggagactgggccggaagaaacaggaaacttctgaagccccggtccatccagaagtcgtggtttgtgcagtttccgtggctgatcatgaatgaggagcagacggctctgttctgctctgcttgccgagaatacccctccatcagggacaaacggtcaagactaatagaaggttatacaggaccattcaaggtggagactctcaaataccacgcgaagagcaaggcccacatgttctgtgtcaatgccttggcagcgagggaccccatctgggcagcccggttccggagcatcagagacccacctggagatgttctggccagcccggagccgctcttcactgcagattgccccatattctaccccccagggcctctgggaggatttgatagcatggctgagctcctgccaagttcaagagctgaactagaggaccctgggggggatggagcaattcctgcaatgtatctagactgcatttcagatttgaggcaaaaagaaatcactgatggcatccacagctcctcagacattaatattttatataatgatgcagtagaatcctgcattcaggacccttctgcagaggggctgtcggaggaggttcctgtggtgtttgaggagctgccggtggtgttcgaggatgtggcagtgtatttcacccgggaggagtggggcatgctagacaagcggcagaaggagctgtacagagacgtgatgcggatgaactacgagctgttggcatccttgggacctgctgctgccaagccagacttgatctccaaactggagcggagggctgcaccctggatcaaggacccaaatgggccaaagtgggggaaaggtcgtcctccagggaacaagaagatggtggcagtgagagaggcagacacacaggcctcggctgcagactccgcgttgcttccaggctctcccgtggaggcccgtgcctcctgctgcagttccagcatttgtgaggaaggagatggacctaggagaatcaagaggacatacaggccccgttccattcagaggtcatggtttgggcagttcccatggttagtaattgaccccaaagagaccaaactcttctgctcagcctgcatagaaagacctaatctccatgataaatcatctcggttagtcagaggttacacggggccttttaaagtggagactttaaaataccatgaagtcagcaaagcgcacaggctctgtgtcaacacggttgaaatcaaggaagacacccctcacactgccctcgttccagagatctccagcgacctcatggccaacatggagcactttttcaatgccgcctactccattgcataccactcaaggcccctgaatgactttgagaagatcctgcagctcctccaaagcacggggaccgtgatattaggcaagtaccgcaatcgcacggcgtgcactcagttcatcaagtacatctcagagaccctgaagagggagatcctggaggacgtgcggaactcgccctgtgtgagcgtgctgctggacagctccaccgacgcctccgagcaggcctgcgtggggatttacatccgctacttcaagcagatggaggtgaaagagtcctacatcactctggcccctctctacagtgagacagcagatgggtacttcgagaccatcgtttctgccctggatgagctggacatccccttccggaagcctggctgggtggtggggctggggacggatggctcagccatgttgagctgcagaggaggccttgtggaaaagttccaggaggtcatcccgcagctgctccctgtccactgcgtggcccaccggctgcacctggctgtggtggacgcctgcgggagcatcgatctggtgaagaagtgtgaccggcacatccgcaccgtcttcaagttttatcagtcctcaaacaagaggctgaacgagctgcaggaaggtgcggcgcctctggagcaggagatcatccgcctgaaggatctgaatgcggtccgctgggtggccagcaggaggcgcacgctgcacgcgctgctcgtgagctggcccgccctggccaggcacctccagagggtggcagaggctgggggccagattgggcaccgggccaaagggatgctgaagctcatgcgcggcttccactttgtcaagttctgccacttcctgttggacttcctgagcatctacaggcctctgtccgaggtgtgccagaaggagatcgtgctgattacagaggtgaacgccacgctgggccgcgcctacgtggcactggagagcctccgtcaccaggcagggcccaaagaggaagaattcaacgccagcttcaaggatgggcggctccacggcatctgcttggacaaactggaggtagcggaacagcggttccaggcggatagggagaggacagtcctgacggggattgagtacctccagcagaggtttgacgcagaccgacccccacagctgaagaacatggaggtgtttgacaccatggcctggccaagtgggattgaacttgccagttttgggaatgatgacattctcaacctggccaggtatttcgagtgctccctcccaacaggatacagtgaggaagctctgctggaggagtggctgggcctgaaaaccattgcccagcacctcccgttctccatgctttgcaaaaacgccctggcccagcactgccgcttccccctgctaagcaagctcatggccgtggtggtctgtgtgcccatctccacctcttgctgtgagcgggggttcaaggccatgaaccgaatcaggaccgatgagaggaccaagctctccaacgaggtgctcaacatgctcatgatgacagctgtgaacggtgtggccgtcacggagtacgacccccagcccgccatccagcactggtacctgacctcctcaggccggcgtttcagccatgtctacacctgtgcccaggtgccagcccgctcccctgcaagcgccaggctcaggaaggaggagatgggagccctctatgtggaggagcccaggacccagaagccacccatcctgccctccagggaagcagcggaggttctgaaggactgcatcatggagcctcccgagagactcctgtatccccacaccagccaggaggcccccgggatgtcctgagggacagggagtccttgggactgccttggagacgcctctgtgatcactgggacaggctctgcagattctaggctgccctaggatcttctgctggtggcgatggtctctaagcaccaggaagtgggcagtggcatcccagagcagcaggggtatcaggaggtgcatgacctgtttcctgaggccccactcagcacagccatgcctcacagcacacaaatgtgccagaaggttctatatctcaagttcatttttaaggtgctgcagaaaataaccccatcatgaaaggtttcagcccctgagttttggtggcaagaggagtgtcctggtaggggagactgttggacatccctggggaatgttccagggaggctgcccacagtctaagtgggaatgggaaagaccaccttgttagagggggaggttgcccctgctctagggacagctggcctggctgcaagagcccccagaggcattgttctgggacttcctaccctggctcccacagcagaagcagtgaggccgtggtctcgtgcggaactctacctcttcccagggcttcctttagggcgaaacaatcacaagccctttgcacagagcacccaagaaagttctcttcctgcagctccagatggtggagctgggctcttctggcagggggtctggtgcttcccggagagccgagccgcgtttaacccgtggcatgcccggcccggtttacccaggagaggatgggacgaagttggagttgggaggcttgggatgcagccccagctctgctgcaggcagtggtctgattaatcccttcctctttgtgcctcagtttccctctccatgaagtggcagcagagatccaagtgcctgctgactccccatctgccctaggattagtgaatgagagcctcgagctccctgaaagacctctggctgcagtgtggacttagctgccatctgccccatcctcgtccttagtgggacaggtaggaatttgtctccaaagtccttgttgtaggagttgctctctgaatgcaccatctgcacgacaggctagtccactcttctctgagctgccctggggactctgcaccaggatctccagggcccactgagacatccccgaatgggcgctcagtgacaagggctttgaacaacctcctccagggactttgggcctgctctagcttcagaaccacagaaccaccgccctagaggcacagaggggcttctggcactgctaggttcacaccctcctcgcccatcttccttccacctaaagtgaagcacttttccttccaagggcagctccgtcttggcaggctcaggaggccgcttatcaggaggaggatgattttgtctaggttctgccttccttaaccatgggcaggaaatgaggcaagtcagcaggcagggtttctctgccctgcctgatacttgttttaaacaggcaggaagtgggcgccatccatcccagcttgcttgctgcctggctcaggcaggtcctgtgctgtgctgcaggcccctgtgggtgggccctttctccatagtctgccgcttcccattcccagggtagatgctggcatctgagcacctgagtacccttcctattcccagggtagaagctgctgtctgagtacccttcccattcccagggtagatgctggcgtccgagcccctccccggtaccgcaggtaccctggtaccccacctgccctttcatccccaccccagtacttagccttagcactgttgctttcgtgtcattttcagttctagtcaggaattcctttcttgctttctgcctttgacctgtggaaatgtctcccagccctgtgggtctggcggtcagagggaccccacaggcctgtggtgcgggagctctgggaggtgttactatctgcgtggctaaggcacacacaggcctccttctccccatcaccgtctccatgggcgttcaggaacttgcccaggtcaggcactgtggatgtgaactcgtggaaagggagggagaaaggcttttttaggtggggctatagcctctgccctacccacagggattccacatcaaggtgctgttccagcacacatgcttcctgcggcctcttcatccttgaagaatccctcagagcaggaggccatcctgtgagcagccgtgagtgggtctctgtgggagtagttctggagctgaggtggaagctaggggaagcaactcgccctctccacgtcagcatcagcgtgctccgaggacaccggccagtgccttccttaggtggtgggaaaggggtgtccctgtgcagcggggccactgagaatgctgtttgtcataaaatttgcactacccgatttctcaaggggcacaggcctgctccgttcccctttgtcagccaatggccaagaaggaagaagatgactgccatcttattcctgaacttcctcattcaggacccccgtggaaacacagtgagcatccttatcagaggccctggcccaggctggcccctttgctttgtttggagaggctggctgagtttcagcccctagtgctggagacccccttgttggagaggcttcctgtttatgcctcacaagaagaaaaaccacagggctctgggaggggaagaagcatgcactcccgctttggctggagtcccagcgcttgtcgccaccctcctccttgcctgtagtcttgacagcatccgtatgtacgtgtcctggcatttcccctccctctccctgatgactgatacccaccgggtctgacattccaagtaaccagtatgtaactggtagtttgatcccaatagccatagcgactccaggtgggagtgagggagcccagccccctgtcctggaagataccttagagtatgtgaccgcgctccagacccttgcttctctctcctgcagaggatgagtttctagggtgctaagtacctatcagaacagtgtggaggggcgggtccctcatacaggtgtgtgcttagccaaatacagtaactgtgactggcccagggatgttctctcctctattttcaaagatgaaaggaggttttaaaaaccatgtttaattcctaaccttttgctacctgaataaagcagagtctatttcaac

SEQ ID NO: 771 - DNA, 2342 bp, HOMO SAPIENS; identical to SEQ ID NO: 466

SEQ ID NO: 772 - DNA, 5038 bp, HOMO SAPIENS
cgctttttccgtaacaaaatagcaaagctcccgactgtccgcagccccggccgctcacagatggagggtcccagggcctaggacgcagcccccagcgggaagctccagctggccgtgaagaggccgagtcgagagccgggaggcgcgcgggggtgggcgctgcagccgcgggttgtttatctggagtacggaggggaggggggagcctggaaaccgccccgtgtcccatttcctcctcttgttttcgctccggattctccatgttggacccaaactgaggagcccggagctgccgctgggggatcggggccgggggcacccgggggagccgctgcccgggccgcccgccctttgtacaggccgcctcccttcccggtccggggaggaaacgagaggggggatgtgaacagctgtggaagtcggagtctcgggagccggagcgggcccccgcccaggccccccagcccagcccagcccgcgcgcccgcccgtcctcccgcccagccagcccgggcccgcgggattgttagatggaacacggctccatcatcacccaggcgcggagggaagacgccctggtgctcaccaagcaaggcctggtctccaagtcctctcctaagaagcctcgtggacgtaacatcttcaaggcccttttctgctgttttcgcgcccagcatgttggccagtcaagttcctccactgagctcgctgcgtataaggaggaagcaaacaccattgctaagtcggatctgctccagtgtctccagtaccagttctaccagatcccagggacctgcctgctcccagaggtgacagaggaagatcaaggaaggatctgtgtggtcattgacctcgatgaaacccttgtgcatagctcctttaagccaatcaacaatgctgacttcatagtgcctatagagattgaggggaccactcaccaggtgtatgtgctcaagaggccttatgtggatgagttcctgagacgcatgggggaactctttgaatgtgttctcttcactgccagcctggccaagtatgccgaccctgtgacagacctgctggaccggtgtggggtgttccgggcccgcctattccgtgagtcttgcgtgttccaccagggctgctacgtcaaggacctcagccgcctggggagggacctgagaaagaccctcatcctggacaactcgcctgcttcttacatattccaccccgagaatgcagtgcctgtgcagtcctggtttgatgacatggcagacactgagttgctgaacctgatcccaatctttgaggagctgagcggagcagaggacgtctacaccagccttgggcagctgcgggccccttagcctgccctgcttccaagcgacggccatcccagtaggggactttcccacactgtgcctttacgatcagcgtgacagagtagaagctggagtgcctcaccacacggcccggaaacagcgggaagtaactggaaagagctttaggacagcttagatgccgagtgggcgaatgccagaccaatgatacccagagctacctgccgccaacttgttgagatgtgtgtttgactgtgagagagtgtgtgtttgtgtgtgtgttttgccatgaactgtggccccagtgtatagtgtttcagtgggggagaagctgaaagaccaagactcttcccaagttagcttgtctcctctcctgtcaccctaagagccactgagttgtgtagggatgaagactattgaagactccattgccaaaccatggcctttcctcagtgttgtaaggcctatgccaaggataaaggaagggtatgcctttgggtactccaggcacacacctttctgaaatccttctccagccagctgctgcagacaaaagatcacatttctgggaagatgagaacttgtttccagaccagcatccagtggccatcaggtcttgtggcccaaaggctatgcttgcctccggctgagtgcctgggataggccttttctatgtctccccaaggctggggtgctgagcctgccttcctcaccacctagccatagtctcaaacctgtggggaaggaggttttctccctgcccgggaagaggacagataactgatttccgttcttttgactgtgttttaaaattctctttctaaacacagagtgttgggcctggtttgtttctgacaaagttacagtcctgggcctgtaatgaatgtcggcggcgctggggttgcagggaaaagacaaatcctcaaagcgtggacgtgtgtccccatggcttgtggatcagctaagctcgggatcatttccataagtctgcttttcagggattctctgctggtgctggtgcaaggacttctgttccaaaggctgggaaaaactaagctgtcccagcccctcccatttcttgggcagggctcttttcctgttgtgtcttcccccagggcctgtcctgtaccgagctctgtctgttccagccttcatccttcctggctgttgcttttcctcttaagggcctcagaactcttgctcttcctgggctgagggggaatgagtgttcttgccatttgccagcctaatgcgcatgctttctgcctctggtaacaggagtgagtgagcccctcagacctgcactctgggtgtctcctgctttcaaaggttcttaatagtgaatgctttaaaattaaagtcatcacgaaatggaagttttcccagggtggaaaataagaggaagtgctgctgtaattgggagcacaaggggcctcccaaaaaggagccccacctcagcatcactgccttaatcgtggcctccctggggtgggtggggttctctcctccctccctccctcctcctggggtgggagggcgctcctgttcccatctctgtgttccctggaggcaggtatcacaaagcatttgtgaattgctttaggtgcagggacaccacccactcaggactcttccccatcatcccttccattgccacaccctagatccagcctcaggaactaacaagttttgagaaaagcaggtagtagagcagcagcttcgtgctctcagcggtggctggctggcatttttctctagcgttgtggtgccaccttcccttcttgtcccaaggttataaggccttgtctttctctttggaatcataaagtggaacagagtccccagaactcatgtggccatttccgccagcatcactccccggtgcctatggggtcccggtgtacctaaagggagaaggaccccatgtgctagccagaaatatactgtctcttgaaggaaagcaggagctcagactcttagagccagctgtggcttcggacccaaggcctgacctaggctgctatcctaatattgcaggaggggcctctcttccaagccccaccctaagggttagcccttggccaaatcttttgccgtctaggcccagccaggcttttctgactaaataagcaataagaggctctaagctgactgagttgcaaggaccctttccgccctcccttggatctccatgtttttccagatggcggaagagcatgtgccaccccctttcctaacagacttgtccaagtgcttggcgtgggacccatgaccaaagcccaggatggcttggtgggagtgtccctgctgcatctgcatgaagcccctgctttttaggcctcactcccatcagaaccctgcctgcccacctgcaactcccccccaacaatgccattcccacttgccccagagaagctactcggccaaacctagccagggtctgttcttgtggaccagagccagcctagtcattatttgctgtcgggtttccagtttcaccgtgtgttagggtgagggatgattgtaaaatttgctcctcaaaggaatcaggccagactcaattttggagggcaagacagggaggaggccgcttcatcccagactctcttctagggcttcccaccatcagcccctcccacttgagactggtctttgggaggcaataggccaccatgcctggtcagcaccaattcaagccatgccaggaatctgcctacctgccaggttcagttcttttaaggtgcctcttcagggacacagtgtgtctctctgattgggcttctaaatcaaaagcctgatgttcgtgtccctctcatagggggagctttggacacaggaccagtttggaaaagggtcaggtaagggtttccactctgcacattgtagagggaacactctgtaggcccatgggtcccttactagagaggttgagtgaatttgccttcagttaacatgggaccttctgtttagcttcctcttgcttcccaaagattttaagcattttgtaaatgtataaactcacctctggtaacagtggcccagacgctgctttgtgctaaaagcatgggaaatgtaaaggcagtctttctctgggaaatggatgctattctattctgctgcccctacctgttcctgaggcctcatttagaaagaaaatcccctcagaaggctgtctggcacccagtgtcctagccaggccaagtatatgagaaaggtaagtccattttccccttcaggtcctcagtggattacttaaccactgctgtccctcggtccctttttcctaaacgggtttagttctgtcttttttctccttttttctaaatgctggtaaatatttacattcagccagggaagaggaggccagaggtcgggccagctgccccattcttttaacgttgtagggcctgcccatggagcggaccctcctctttgggcctcgtgagcttttttgcttatcatgttccatttcgtgccgctttcccccttcaagatgccatttggagggtaggggatctgcttcccactgtgactgggctatgggattctgactaccttgcttacagattcatggtttgataaatttgttgtattcaaaaacttgaaatgcaggacgccattaagtgtctgtttatatttttggaatatttgtattacttacaattaattaataaaagtgggtttaaaaaacctttccaggaaaaaaaaaaaaaaaaaaaa

SEQ ID NO: 773 - DNA, 1497 bp, HOMO SAPIENS
agtccggccggaacctgtttgcgaccccgagtcccatgacaccgcttctcctcacaccccagtccgcagtgcccctccccagcctcggccgggcctcccgggagccgggcgtggcgttccagctagtgagccgtttctcccctgggctcggaggcggaagcttgaggggcgcggggaggagcttcgcgtgcggggtgaacgcccgctctacgtgctcgttctcttcgcgaccgctgcgcgcgagccccgtgtccccacggcgggcagcagcggcggcggcggcggctgaacgcggagggggcggagggagcccgcggcggcggcagcagctacagcgaaatggcggagaccgtggctgacacccggcggctgatcaccaagccgcagaacctgaatgacgcctacggaccccccagcaacttcctcgagatcgatgtgagcaacccgcaaacggtgggggtcggccggggccgcttcaccacttacgaaatcagggtcaagacaaatcttcctattttcaagctgaaagaatctactgttagaagaagatacagtgactttgaatggctgcgaagtgaattagaaagagagagcaaggtcgtagttcccccgctccctgggaaagcgtttttgcgtcagcttccttttagaggagatgatggaatatttgatgacaattttattgaggaaagaaaacaagggctggagcagtttataaacaaggtcgctggtcatcctctggcacagaacgaacgttgtcttcacatgtttttacaagatgaaataatagataaaagctatactccatctaaaataagacatgcctgaaatttggcaagaaggggcaaaaacgtgactattaatgattgataagcaccagtgaagaagttctaacttttagcatgctgcacagaaactggtataacatgccttcagtatactaacactcatatgctcagttttgttttgttttggcagttgacaagaagttaatttgctttagtaaaaatccctcattccagcctttctatataaatagctctttcttgctgttttaatgtggtgcacactatagcctcacaaacctgttattccagtgtaatctgcagtgtcgtaactaaagttactggcttggtcttatttgcacagtttttgcgtcttgtttgcttcttgcatctgattaactagaatatttctctttcccccttttaatttgtgatgtcacttgaccccatttatgtgtaggagcactacaccattggtttccaatactgcacacataagatacatacttgtgtgcagaaagtatcttcctccaggcttgtaatacccttcacatggaagattaatgagggaaatctttatattctgtataaaaacaaaagcaaatttatatactaaaatcatttgtctaaaaatttaagttgttttcaaataaaaattaaaatgcatttctgatatgcaaaaaaaaaaaaaaaaaaaaaaaaaaaaaaaaaa

SEQ ID NO: 774 - DNA, 1614 bp, HOMO SAPIENS; identical to SEQ ID NO: 523

SEQ ID NO: 775 - DNA, 2270 bp, HOMO SAPIENS
gttagtcgggagggggcgctgtacgcgcgctgtacgcttgcgcgaggtgacgccggggcagggccggaaggaatgcagcggctgccacggagctcgtagctgcagctttggaggagtaagcggcgtggtagcgaaggtcgccgaacccgcctggctagccggcgagttgagtggcgactcttttgaaacagatggtcaccatgtttagatattagcagtcccgtatgtgcatgtctgcatttgaaaatggaagagggaaacaacaatgaagaggtaattcacttgaacaactttcactgccatcggggacaagactttgtaattttcttctggaaaacccagattatccaaagagagaagacagaatcattataaatcccagtagcagtctgctggccagccaagatgagacaaagttgcctaaaataagacttttttgactattctaaattgactcctcttgaccagcactgcttcatccaagctgctgacctcctcatggccgacttcaaagtgctcagtagtcaggacatcatgtgggccctgcacgagctcaaaggacactatgcaatcacccgaaaggccttttctgatgccattaaaaaatggcaggagctatcaccagaaaccagtggaaaaaggaaaaagagaaaagaaatgaaccagtattcttaaattgatttcaagtttgaacaaggggttggcatctgcacatccttcctgggcatctcgtgggcactgctcgattaccaccaggccttgcacacctgcctcccctccaagcccctcctgggcctgggctcctctgtgatctacgtcctgtggaacctgctgctactgtggccccgagtcctagctgtggccctgttctcagccctcttccccagtatgtagccctgcatttcctgggcctgtggctggtactgctgctctgggtttggcttcaaggcacagacttcatgctggaccccagttccgagtatcctctatttctcctggttcaacgtggctgagggccacacccgaggccgggccaccatccacttggctttcctcctgagtgacagcattctcctggtggccacctgggtgacttacagctcctggctgcccagcaggattccactgcagctgtggctgcctgtaggaggcggatgcttctttctgggcctggctctgtggcttgtgtgctactgctggctgcaccctagctgatgctgggagcccaaccctgaccaggtggacaggacccagagtctactttcctcagaggggtatcagctgcctcagacccagttagcacagaacttttttcccaagggtaaggctgaggctgcttcgccagtgaagggagaggtgaacggcgtcctttgaagcaggatcagacccagccagcagagatggagagtgactgctggcagaaggcaggcgaggataagctaacgatgctgctgtggcctccatgcactcagcaagagtgggatgcctctgctgggccgtgcaccagggatggtgctgagtggggcagaggcctgccttcaaggagttcacagtgaacaagatgagaagggctgggccctgcagggtcaagagccccaattacgtacaagacactttgggaggaaagacgactaccttttcttttccccctgccattggtatagctggtgccccaaaactttcacctccctccctggccacctctaaaatgattggtataggggcttccccaccccttagctcccctatcctgggctagaaggccacagggactgtcctctagaattcttcctcccctcccccacaccattcattcaattcgtgaaacaaatcttcaccgagagcagtttatgtgctaggaacatcattctatccttgcaacctggaacaagaccagctaccaccttagcttcatcccctacttgcaccaaccagtcccgggttagatctcaaatgccggaagtcagggatgcccaactctgggcagccccagtcagaacctctgggatctcagtgaagctggcctggcctctgctcttgctctcaaggggctgcttttcaaccaagagccttgtgagcctggtctgagccttgcacagccactgagtattttttattccttagccagtgtacctcctacctcagagtctatgtgagaggaagagaatgtgtgtccctgtgggtctctgcaagtgacagatgtgttgtttttaacagtattattaggttatgattaaagcctcatgaaatcctctaaaaaaaaaaaaaaa

SEQ ID NO: 776 - DNA, 10924 bp, HOMO SAPIENS; identical to SEQ ID NO: 389

SEQ ID NO: 777 - DNA, 3193 bp, HOMO SAPIENS; identical to SEQ ID NO: 470
